(19) United States
(12) Patent Application Publication
(10) Pub. No.: US 2015/0218620 A1
(43) Pub. Date: Aug. 6, 2015

(54) METHODS TO CAPTURE AND/OR REMOVE HIGHLY ABUNDANT RNAS FROM A HETEROGENOUS RNA SAMPLE

(71) Applicant: Integrated DNA Technologies, Inc., Coralville, IA (US)

(72) Inventors: Mark Aaron Behlke, Coralville, IA (US); Rami Zahr, San Francisco, CA (US)

(21) Appl. No.: 14/613,344

(22) Filed: Feb. 3, 2015

Related U.S. Application Data
(60) Provisional application No. 61/935,436, filed on Feb. 4, 2014.
(60) Provisional application No. 61/935,184, filed on Feb. 3, 2014.

(51) Int. Cl. C12Q 1/68

(52) U.S. Cl. CPC C12Q 1/6806; C12Q 1/6874

(57) ABSTRACT

The invention is directed to a method of using DNA oligonucleotides as baits to capture and selectively remove highly abundant RNAs from a heterogeneous RNA sample for improved enrichment of other RNAs that are unrelated to the highly abundant RNAs.

### CROSS-REFERENCE TO RELATED APPLICATIONS

[0001] This application claims benefit of priority under 35 U.S.C. 119 to U.S. provisional patent application Ser. Nos. 61/935,184 and 61/935,436, filed Feb. 3, 2014 and Feb. 4, 2014, respectively and entitled “METHODS TO CAPTURE AND/OR REMOVE HIGHLY ABUNDANT RNAS FROM A HETEROGENEOUS RNA SAMPLE,” the contents of which are herein incorporated by reference in their entirety.

### SEQUENCE LISTING

[0002] The instant application contains a Sequence Listing that has been submitted in ASCII format via EFS-Web and is hereby incorporated by reference in its entirety. Said ASCII copy, created on ______, is named IDT01-006-______ST25.txt, and is ______ bytes in size.

### FIELD OF THE INVENTION

[0003] This invention relates to methods for ribonucleic acid (RNA) selection, removal and enrichment. In particular, the invention pertains to DNA oligonucleotides as hybridization baits to capture and/or remove highly abundant RNAs from a heterogeneous RNA sample for improved enrichment of other RNAs that are unrelated to the highly abundant RNAs. The oligonucleotide compositions and reagents find robust applications for preparing cDNA libraries and cDNA nucleic acid templates for next generation sequencing applications.

### BACKGROUND OF THE INVENTION

[0004] Nucleic acid hybridization has a significant role in biotechnology applications pertaining to identification, selection, and sequencing of nucleic acids. Sequencing applications with genomic nucleic acids as the target materials demand one to select nucleic acid targets of interest from a highly complex mixture. The quality of the sequencing efforts depends on the efficiency of the selection process, which, in turn, relies upon how well nucleic acid targets can be enriched relative to non-target sequences.

[0005] A variety of methods have been used to enrich for desired sequences from a complex pool of nucleic acids, such as genomic DNA or cDNA. These methods include the polymerase chain reaction (PCR), molecular inversion probes (MIPs), or sequence capture by hybrid formation (“hybrid capture;” See, for example, Mamanova, L., Coffey, A. J., Scott, C. E., Kozarewa, I., Turner, E. H., Kumar, A., Howard, E., Shendure, J. and Turner, D. J. (2010) “Target-enrichment strategies for next-generation sequencing,” Nat. Methods 7:111-118.). Hybrid capture offers advantages over other methods in that this method requires fewer enzymatic amplification or manipulation procedures of the nucleic acid target as compared to the other methods. The hybrid capture method introduces fewer errors into the final sequencing library as a result. For this reason, the hybrid capture method is a preferred method for enriching for desired sequences from a complex pool of nucleic acids and is ideal for preparing templates in next generation sequencing (NGS) applications, where single molecular detection events occur and users may intend to identify rare mutations present in a mixed sequence population where errors introduced by polymerase action cannot easily be distinguished from natural variation.

[0006] The NGS applications usually involve randomly breaking long genomic DNA, RNA, or cDNA into smaller fragment sizes having a size distribution of 100-3,000 bp in length, depending upon the NGS platform used. The DNA termini are enzymatically treated to facilitate ligation and universal DNA adaptors are ligated to the ends to provide the resultant NGS templates. The terminal adaptor sequences provide a universal site for primer hybridization so that clonal expansion of the desired DNA targets can be achieved and introduced into the automated sequencing processes used in NGS applications. The hybrid capture method is intended to reduce the complexity of the pool of random DNA fragments from, for example, from 3×10⁹ bases (the human genome) to much smaller subsets of 10³ to 10⁸ bases that are enriched for specific sequences of interest. The efficiency of this process directly relates to the quality of capture and enrichment achieved for desired DNA sequences from the starting complex pool.

[0007] The NGS applications typically use the hybrid capture method of enrichment in the following manner. A prepared pool of NGS templates is heat denatured and mixed with a pool of capture probe oligonucleotides (“baits”). The baits are designed to hybridize to the regions of interest within the target genome and are usually 60-200 bases in length and further are modified to contain a ligand that permits subsequent capture of these probes. One common capture method incorporates a biotin group (or groups) on the baits. Other capture ligands can be used. After hybridization is complete to form the DNA template:bait hybrids, capture is performed with a component having affinity for only the bait. For example, streptavidin-magnetic beads can be used to bind the biotin moiety of biotinylated-baits that are hybridized to the desired DNA targets from the pool of NGS templates. Washing removes unbound nucleic acids, reducing the complexity of the retained material. The retained material is then eluted from the magnetic beads and introduced into automated sequencing processes, providing for ‘capture enrichment’, where the captured nucleic acids are retained as an enriched pool for subsequent study.

[0008] Another strategy is to use hybrid capture to remove sequences homologous to those of the capture probes or baits, thereby enriching the remaining complex nucleic acid sample for desired sequence content by clearing or removing undesired content which is homologous to the capture probes. This strategy is generally of little use when the nucleic acid sample is genomic DNA, where removal of a minority of undesired sequences does not appreciably enrich the remaining sample for desired sequences. However, this approach can have significant benefit when applied to a sample of total cellular RNA. Typically sequencing of RNA (RNA-Seq) by NGS methods involves conversion of RNA to cDNA (before or after fragmentation), ligation of cDNA fragments to linkers, library preparation, and sequencing similar to what is done for genomic DNA (see: Cloonan, N. et al. (2008) Stem cell transcriptome profiling via massive-scale mRNA sequencing. Nat. Methods 5, 613-619; Mortazavi, A., Williams, B. A., McCue, K., Schaeffer, L. & Wold, B. (2008) Mapping and quantifying mammalian transcriptomes by RNA-seq. Nat. Methods 5, 621-628; Guttman, M. et al. (2010) Ab initio reconstruction of cell type-specific transcriptomes in mouse reveals the conserved multi-exonic structure of lincRNAs. Nat. Biotechnol. 28, 503-510.). A major problem with RNA-Seq, however, is that ˜80-95% of the total RNA sample is ribosomal RNA (rRNA). RNA-Seq is typically performed to study the mRNA, long-non-coding RNAs, and other unique RNAs, which are generally present at low frequencies. Having 80-95% of the sequence space consumed by sequencing unwanted rRNA increases cost and decreases throughput. Methods that remove rRNA prior to sequencing greatly improve the amount of useful sequence information obtained from an RNA-Seq NGS run.

[0009] This same strategy could be useful, for example, to remove any overexpressed RNA from a total RNA sample, not just rRNA. One such example is encountered in sequencing reticulocyte RNA, which contains an overabundance of hemoglobin mRNA. Removal of hemoglobin mRNA improves the ability to study non-hemoglobin RNAs present in reticulocytes. One method described which could be applied to removal of hemoglobin mRNA, rRNA, or any other overabundant species was described by Ambion in US patent application US2006/0257902 (Mendoza, L. G., Moturi, S., Setterquist, R., and Whitley, J. P., METHOD AND COMPOSITIONS FOR DEPLETING ABUNDANT RNA TRANSCRIPTS). In this application, methods are disclosed whereby RNA capture baits are made by in vitro transcription (IVT) from DNA templates. The RNA baits comprise two domains, a universal capture domain and a target binding domain. The target binding domain binds to (e.g., is complementary to and anneals to) the overabundant RNA species that is desired to be depleted. The RNA bait is hybridized to a complex RNA mixture, the baits anneal to their targets, then the bait:target complexes are removed by hybridization to magnetic beads (or other solid phase particles) that bear sequence tags complementary to the universal capture domain on the RNA bait. The captured overabundant species are removed from the complex mixture, which is then used for downstream applications, such as sequencing.

[0010] It is also possible to purify mRNA from total RNA by capture using oligo-dT to bind the poly-A tail present on mRNAs. However, this method can still retain a significant amount of rRNA contamination. Methods have been disclosed to improve the results obtained using this approach largely through use of improved buffers and hybridization methods. See US patent U.S. Pat. No. 6,812,341 (Conrad, R. C., HIGH EFFICIENCY MRNA ISOLATION METHODS AND COMPOSITION, Nov. 2, 2004). However, this approach only serves to capture mRNA. It has recently been appreciated that an important fraction of long non-coding RNAs (IncRNAs) and some translated mRNAs (such as those encoding histone proteins) do not have poly-A tails and therefore would not be captured using this approach. Therefore to obtain a comprehensive evaluation of the RNA species present in a cell using RNA-Seq methods, it is more preferable to remove rRNA from the complex mixture than to purify/isolate the poly-A mRNA fraction.

[0011] One current method to remove rRNA from total cellular RNA prior to performing RNA-Seq experiments is the “Ribo-Zero rRNA removal kit” sold by Epicentre/Illumina. See: http://www.epibio.com/applications/ma-sequencing/rrna-removal/ribo-zero-gold-kits-(human-mouse-rat). In this method, biotin-tagged RNA baits are made using in vitro transcription (IVT) with biotin-UTP so that the biotin label is present internally in the RNA bait capture probe. See US Patent Application by Sooknanan, R. R., US2011/0040081, METHODS, COMPOSITIONS, AND KITS FOR GENERATING RRNA-DEPLETED SAMPLES OR ISOLATING RRNA FROM SAMPLES.

[0012] Biotin-labeled RNA bait capture probes are expensive to prepare owing to the significant cost of biotin-UTP as a starting material. Accordingly, the cost of performing RNA-Seq experiments for NGS applications can be significant depending upon the number of RNA baits required as capture probes.

[0013] Another current method to remove rRNA from total cellular RNA prior to performing RNA-Seq experiments is the “GeneRead rRNA depletion kit” sold by QIAGEN (cat. no. 180211). See: http://www.qiagen.com/products/catalog/assay-technologies/next-generation-sequencing/generead-rrna-depletion-kit. This approach employs simpler synthetic DNA baits but relies upon a more complex clearance approach using a antibody that recognizes the RNA:DNA heteroduplex structure formed by the DNA capture bait and the rRNA target, followed by secondary capture/pull-down by a magnetic bead derivatized to bind antibody fragments. See: O'Neil, D., Glowatz, H., and Schlumpberger, M. (2013) Ribosomal RNA depletion for efficient use of RNA-seq capacity. Current Protocols in Molecular Biology 4.19.1-4.19.8 (July 2013). Due to the simple DNA baits employed, this method is less expensive to perform than the biotinylated-RNA bait method from Epicentre, but is still a costly step in RNA-Seq library production. Yet another current method to remove rRNA from total cellular RNA prior to performing RNA-Seq experiments is the “RiboMinus™ Eukaryote Kit for RNA-Seq” sold by Ambion/Life Technologies. See: http://www.lifetechnologies.com/us/en/home/life-science/dna-rna-purification-analysis/rna-ex traction/rna-applications/ribosomal-rna-depletion/ribominustechnologypage.html. This method employs synthetic DNA baits modified with high affinity locked nucleic acid (LNA) residues. This modification enables the baits to be shorter and retain high binding affinity; however, the LNA modification is costly. In this case the baits are modified with a terminal biotin ligand, permitting clearance of the unwanted rRNA:bait complex with streptavidin-magnetic beads. In spite of the simple biotin-SA-bead capture approach, this method remains expensive to perform due to the higher cost of manufacture of LNA-modified capture baits. Another method to remove ribosomal RNA is disclosed in U.S. patent application Ser. No. 12/940,981, “Methods for depleting RNA from nucleic acid samples”, Sinicropi et al. In this method, unmodified DNA oligonucleotides complementary to ribosomal RNA are hybridized to an RNA sample containing ribosomal RNA, and the sample is then treated with RNase H, an enzyme that selectively cleaves the RNA strand in an RNA/DNA heteroduplex. The sample is then treated with DNase to cleave the excess DNA oligonucleotides. Disadvantages of this method are the lengthy and complex temperature gradient required for the oligonucleotide hybridization step and the requirement for 2 nuclease steps. Nuclease treatment runs the risk of degradation of desired RNA, due to either non-specific activity of nucleases for degrading non-target nucleic acids, or to contamination of a specific nuclease (for example RNase H) with other nuclease(s) (for example RNase A) having unwanted activity (for example, activity directed toward degradation of mRNA).

[0014] Several of the methods for rRNA depletion described above include a series of steps where the undesired RNA (e.g. rRNA) complexed with biotinylated capture oligonucleotide(s), and also excess biotinylated capture oligonucleotides not complexed with undesired RNA, are removed by linking the complex and the excess capture oligos to streptavidin-modified magnetic particles, and then removing the particles along with the undesired RNA/capture oligonucleotide complex. The step of removing the magnetic particles is typically accomplished by placing the vessel containing the reaction components on a magnetic stand for several minutes to attract the magnetic particles (linked to the undesired RNA/oligo complex) to the side of the vessel and then removing the fluid containing the desired RNA and transferring it to a second vessel. These steps are time-consuming, require the use of additional consumables (the second vessels and pipet tips used for transfer), and run the risk of introducing errors in sample identity during transfer of the fluid with desired RNA (i.e. risk of sample mix-up during transfer). Improved methods for accomplishing the steps of magnetic attraction and sample transfer that avoid these drawbacks would reduce the time and cost required for sample preparation and also minimize the risk of sample mix-up.

[0015] There is a need for more economical reagents and improved methods for ribonucleic acid (RNA) selection, removal and enrichment such that highly abundant RNAs can be removed from a heterogeneous RNA sample for improved enrichment of other RNAs that are unrelated to the highly abundant RNAs. Economical approaches for preparing cDNA nucleic acid templates for next generation sequencing applications would dramatically reduce the cost of RNA-Seq experiments for NGS applications.

### BRIEF SUMMARY OF THE INVENTION

[0016] In one aspect, the invention relates to a method of selecting an undesired RNA target from a population of RNA molecules. The method includes two steps. The first step includes contacting the population of RNA molecules with one or more DNA oligonucleotides comprising a bait to form a mixture wherein the DNA bait anneals or hybridizes to any complementary RNA species present in the mixture. The second step includes removing the undesired RNA target:bait complex from the mixture.

[0017] In a second aspect, the invention relates to a method of performing massively parallel sequencing of RNA from a sample. The method includes four steps. The first step includes contacting the complex population of total RNA with a plurality of DNA oligonucleotides comprising baits to form a mixture. At least one member of the plurality of DNA oligonucleotides comprising baits has substantial sequence complementarity to a sequence within at least one species of an undesired RNA target. The second step includes isolating at least one species of an undesired RNA target from the mixture to form a depleted population of total RNA. The third step includes preparing a cDNA library from the depleted population of total RNA. The fourth step includes sequencing the double-stranded cDNA library generated from the depleted library population of total RNA.

[0018] In a third aspect, the invention relates to a kit that includes a capture reagent for use in a selection method of an undesired RNA. The capture reagent includes a plurality of DNA bait oligonucleotides. Each member of the plurality of DNA bait oligonucleotides is prepared individually by a synthetic chemical process.

### BRIEF DESCRIPTION OF THE DRAWINGS

[0019] FIG. 1 depicts a strategy for selection and removal of undesired RNA targets from a total RNA mixture without co-selection of desired RNAs. The DNA baits are illustrated as short lines coupled to a terminal bulb (signifying an exemplary 5′-biotin moiety), and the bead coupled to streptavidin (starlet symbol) to capture the biotin-coupled complex.

[0020] FIG. 2 shows a gelshift assay demonstrating binding of bait probes to rRNA. Varying amounts of stock DNA bait solution were hybridized to 1 μg of human total genomic RNA (see Example 1), separated on an agarose gel, stained with ethidium bromide, and visualized using UV-induced fluorescence. An inverted gel image is shown. Lane 1: 0.25 μL bait solution, Lane 2: 0.5 μL bait solution; Lane 3: 1.0 μL bait solution; Lane 4: 1.5 jμL bait solution; Lane 5: control with no bait.

[0021] FIG. 3 shows removal of rRNA from total RNA using biointylated baits and capture with streptavidin (SA) magnetic beads. Varying amounts of stock DNA bait solution were hybridized to 1 μg of human total genomic RNA (See Example 2). The rRNA:bait complexes were removed using varying amounts of SA-magnetic beads. The remaining nucleic acids present in the samples were separated on an agarose gel, stained with ethidium bromide, and visualized using UV-induced fluorescence. An inverted gel image is shown. Lane 1: 0.25 μL bait solution+20 μL SA-mag beads; Lane 2: 0.25 μL bait solution+30 μL SA-mag beads; Lane 3: 0.5 μL bait solution+20 μL SA-mag beads; Lane 4: 0.5 μL bait solution+30 μL SA-mag beads; Lane 5: 0.25 μL bait solution with no SA-mag bead clearance; Lane 6: 0.5 μL bait solution with no SA-mag bead clearance.

[0022] FIG. 4 shows rRNA depletion from RNA-Seq NGS libraries. Total human cellular RNA (1 μg or 3 μg) was depleted of rRNA using the method of the invention. A sample was mock-treated as control. RNAs were converted to cDNA and NGS libraries were prepared and sequencing performed on a MiSEQ instrument. Sequencing reads were mapped to the human genome and the relative percent of total reads mapping to rRNA sequences, human non-rRNA sequences, and unmapped sequences (e.g., primer dimers and other elements of non-human origin) is indicated.

[0023] FIG. 5 shows removal of rRNA from total RNA using biointylated baits and capture with streptavidin (SA) magnetic beads using a DNase-free protocol. DNA bait solution was hybridized to 2 μg of human total genomic RNA (See Example 2) and removed using SA-magnetic beads. Samples were separated on an agarose gel, stained with ethidium bromide, and visualized using UV-induced fluorescence. An inverted gel image is shown. Lane 1: 2 μg of human total genomic RNA+1 μL bait solution; Lane 2: mock depletion of 2 μg of human total genomic RNA with no bait solution.

[0024] FIG. 6 shows rRNA depletion from total human RNA assayed by RT-PCR. Total human cellular RNA (2 μg) was depleted of rRNA using the method of the invention. A sample was mock-treated as control. RNAs were converted to cDNA and end point PCR was performed using the primers indicated. Samples were separated by agarose electrophoresis and visualized by ethidium bromide fluorescence. An inverted gel image is shown. Lanes 1,2: 12S mitochondrial rRNA; Lanes 3,4: 16S mitochondrial rRNA; Lanes 5,6: 18S cytoplasmic rRNA; Lanes 7,8: 28S cytoplasmic rRNA; Lanes 9,10: GAPDH mRNA. Input RTs as follows: Lanes 1,3,5,7,9,11,13 were from the RNA prep depleted of rRNA by hybridization to bait and Lanes 2,4,6,8,10,12,14 were from mock-hybridized RNA not depleted with bait (control).

### DETAILED DESCRIPTION OF THE INVENTION

[0025] Certain terms are first defined. Additional terms are defined throughout the specification.

[0026] Terms used herein are intended as “open” terms (for example, the term “including” should be interpreted as “including but not limited to,” the term “having” should be interpreted as “having at least,” the term “includes” should be interpreted as “includes but is not limited to,” etc.).

[0027] Furthermore, in those instances where a convention analogous to “at least one of A,B and C, etc.” is used, in general such a construction is intended in the sense of one having ordinary skill in the art would understand the convention (for example, “a system having at least one of A, B and C” would include but not be limited to systems that have A alone, B alone, C alone, A and B together, A and C together, B and C together, and/or A, B, and C together.). It will be further understood by those within the art that virtually any disjunctive word and/or phrase presenting two or more alternative terms, whether in the description or figures, should be understood to contemplate the possibilities of including one of the terms, either of the terms, or both terms. For example, the phrase “A or B” will be understood to include the possibilities of “A” or ‘B or “A and B.”

[0028] All language such as “from,” “to,” “up to,” “at least,” “greater than,” “less than,” and the like, include the number recited and refer to ranges which can subsequently be broken down into sub-ranges as discussed above.

[0029] A range includes each individual member. Thus, for example, a group having 1-3 members refers to groups having 1, 2, or 3 members. Similarly, a group having 6 members refers to groups having 1, 2, 3, 4, 5, or 6 members, and so forth.

[0030] The modal verb “may” refers to the preferred use or selection of one or more options or choices among the several described embodiments or features contained within the same. Where no options or choices are disclosed regarding a particular embodiment or feature contained in the same, the modal verb “may” refers to an affirmative act regarding how to make or use and aspect of a described embodiment or feature contained in the same, or a definitive decision to use a specific skill regarding a described embodiment or feature contained in the same. In this latter context, the modal verb “may” has the same meaning and connotation as the auxiliary verb “can.”

[0031] As used herein, the articles “a” and “an” refer to one or to more than one (for example, to at least one) of the grammatical object of the article.

[0032] As used herein, “or” is used herein to mean, and is used interchangeably with, the term “and/or”, unless context clearly indicates otherwise. The use of the term “and/or” in some places herein does not mean that uses of the term “or” are not interchangeable with the term “and/or” unless the context clearly indicates otherwise.

[0033] “About” and “approximately” shall generally mean an acceptable degree of error for the quantity measured given the nature or precision of the measurements. Exemplary degrees of error are within 25 percent (%), typically, within 10%, and more typically, within 5% of a given value or range of values.

[0034] The term “affinity tag” refers to a ligand that permits detection and/or selection of an oligonucleotide sequence to which the ligand is attached. For the purposes of this disclosure, a bait may include an affinity tag. In particular, the affinity tag is positioned typically at either or both the 3′-terminus and/or 5′-terminus of an oligonucleotide through the use of conventional chemical coupling technology. Exemplary affinity tags include biotin, digoxigenin, streptavidin, polyhistidine (for example, (His6),), glutathione-S-transferase (GST), HaloTag®, AviTag, Calmodulin-tag, polyglutamate tag, FLAG-tag, HA-tag, Myc-tag, S-tag, SBP-tag, Softag 3, V5 tag, Xpress tag, a hapten, among others.

[0035] “Acquire” or “acquiring” as the terms are used herein, refer to obtaining possession of a physical entity, or a value, for example, a numerical value, by “directly acquiring” or “indirectly acquiring” the physical entity or value. “Directly acquiring” means performing a process (for example, performing a synthetic or analytical method) to obtain the physical entity or value. “Indirectly acquiring” refers to receiving the physical entity or value from another party or source (for example, a third party laboratory that directly acquired the physical entity or value). Directly acquiring a physical entity includes performing a process that includes a physical change in a physical substance, for example, a starting material. Exemplary changes include making a physical entity from two or one starting materials, shearing or fragmenting a substance, separating or purifying a substance, combining two or more separate entities into a mixture, performing a chemical reaction that includes breaking or forming a covalent or non-covalent bond. Directly acquiring a value includes performing a process that includes a physical change in a sample or another substance, for example, performing an analytical process which includes a physical change in a substance, for example, a sample, analyte, or reagent (sometimes referred to herein as “physical analysis”), performing an analytical method, for example, a method which includes one or more of the following: separating or purifying a substance, for example, an analyte, or a fragment or other derivative thereof, from another substance; combining an analyte, or fragment or other derivative thereof, with another substance, for example, a buffer, solvent, or reactant; or changing the structure of an analyte, or a fragment or other derivative thereof, for example, by breaking or forming a covalent or non-covalent bond, between a first and a second atom of the analyte; or by changing the structure of a reagent, or a fragment or other derivative thereof, for example, by breaking or forming a covalent or non-covalent bond, between a first and a second atom of the reagent.

[0036] “Acquiring a sequence” or “acquiring a read” as the term is used herein, refers to obtaining possession of a nucleotide sequence or amino acid sequence, by “directly acquiring” or “indirectly acquiring” the sequence or read. “Directly acquiring” a sequence or read means performing a process (for example, performing a synthetic or analytical method) to obtain the sequence, such as performing a sequencing method (for example, a Next Generation Sequencing (NGS) method). “Indirectly acquiring” a sequence or read refers to receiving information or knowledge of, or receiving, the sequence from another party or source (for example, a third party laboratory that directly acquired the sequence). The sequence or read acquired need not be a full sequence, for example, sequencing of at least one nucleotide, or obtaining information or knowledge, that identifies one or more of the alterations disclosed herein as being present in a subject constitutes acquiring a sequence.

[0037] Directly acquiring a sequence or read includes performing a process that includes a physical change in a physical substance, for example, a starting material, such as a tissue or cellular sample, for example, a biopsy, or an isolated nucleic acid (for example, DNA or RNA) sample. Exemplary changes include making a physical entity from two or more starting materials, shearing or fragmenting a substance, such as a genomic DNA fragment; separating or purifying a substance (for example, isolating a nucleic acid sample from a tissue); combining two or more separate entities into a mixture, performing a chemical reaction that includes breaking or forming a covalent or non-covalent bond. Directly acquiring a value includes performing a process that includes a physical change in a sample or another substance as described above.

[0038] “Acquiring a sample” as the term is used herein, refers to obtaining possession of a sample, for example, a tissue sample or nucleic acid sample, by “directly acquiring” or “indirectly acquiring” the sample. “Directly acquiring a sample” means performing a process (for example, performing a physical method such as a surgery or extraction) to obtain the sample. “Indirectly acquiring a sample” refers to receiving the sample from another party or source (for example, a third party laboratory that directly acquired the sample). Directly acquiring a sample includes performing a process that includes a physical change in a physical substance, for example, a starting material, such as a tissue, for example, a tissue in a human patient or a tissue that has was previously isolated from a patient. Exemplary changes include making a physical entity from a starting material, dissecting or scraping a tissue; separating or purifying a substance (for example, a sample tissue or a nucleic acid sample); combining two or more separate entities into a mixture; performing a chemical reaction that includes breaking or forming a covalent or non-covalent bond. Directly acquiring a sample includes performing a process that includes a physical change in a sample or another substance, for example, as described above.

[0039] “Bait,” as used herein, is type of hybrid capture reagent. A bait can be a nucleic acid molecule, for example, a DNA or RNA molecule, which can hybridize to (for example, be complementary to), and thereby allow capture of a nucleic acid target. In one embodiment, a bait is an RNA molecule (for example, a naturally-occurring or modified RNA molecule); a DNA molecule (for example, a naturally-occurring or modified DNA molecule), or a combination thereof. In other embodiments, the bait includes incorporation of chemical modifiers which increase binding affinity of the bait to the target RNA nucleic acid, such as locked nucleic acid residues (LNAs), 2′-O-methyl RNA residues, or other similar modifiers as are well known to those with skill in the art. In other embodiments, a bait is a peptide nucleic acid (PNA) molecule. In other embodiments, a bait includes a binding entity, for example, an affinity tag, that allows capture and separation, for example, by binding to a binding entity, of a hybrid formed by a bait and a nucleic acid hybridized to the bait. In one embodiment, a bait is suitable for solution phase hybridization. A “DNA bait” refers to a bait composed of DNA residues, and an “RNA bait” refers to a bait composed of RNA residues.

[0040] “Bait set,” as used herein, refers to one or a plurality of bait molecules.

[0041] “Binding entity” means any molecule to which molecular tags can be directly or indirectly attached that is capable of specifically binding to an analyte. The binding entity can be an affinity tag on each bait sequence. In certain embodiments, the binding entity allows for separation of the bait/member hybrids from the hybridization mixture by binding to a partner, such as an avidin molecule, or an antibody that binds to the hapten or an antigen-binding fragment thereof. Exemplary binding entities include, but are not limited to, an affinity tag, a biotin molecule, a hapten, an antibody, an antibody binding fragment, a peptide, and a protein.

[0042] “Complementary” refers to sequence complementarity between regions of two nucleic acid strands or between two regions of the same nucleic acid strand. It is known that an adenine residue of a first nucleic acid region is capable of forming specific hydrogen bonds (“base pairing”) with a residue of a second nucleic acid region that is antiparallel to the first region if the residue is thymine or uracil. Similarly, it is known that a cytosine residue of a first nucleic acid strand is capable of base pairing with a residue of a second nucleic acid strand that is antiparallel to the first strand if the residue is guanine. A first region of a nucleic acid is complementary to a second region of the same or a different nucleic acid if, when the two regions are arranged in an antiparallel fashion, at least one nucleotide residue of the first region is capable of base pairing with a residue of the second region. In certain embodiments, the first region comprises a first portion and the second region comprises a second portion, whereby, when the first and second portions are arranged in an antiparallel fashion, at least about 50%, at least about 75%, at least about 90%, or at least about 95%/o of the nucleotide residues of the first portion are capable of base pairing with nucleotide residues in the second portion. In other embodiments, all nucleotide residues of the first portion are capable of base pairing with nucleotide residues in the second portion.

[0043] As used herein, the term “library” refers to a collection of members. In one embodiment, the library includes a collection of nucleic acid members, for example, a collection of whole genomic, subgenomic fragments, cDNA, cDNA fragments, RNA, RNA fragments, or a combination thereof. In one embodiment, a portion or all of the library members comprises a non-target adaptor sequence. The adaptor sequence can be located at one or both ends. The adaptor sequence can be useful, for example, for a sequencing method (for example, an NGS method), for amplification, for reverse transcription, or for cloning into a vector.

[0044] The library can comprise a collection of members, for example, a target member (for example, a highly abundant RNA). The members of the library can be from a single individual. In embodiments, a library can comprise members from more than one subject (for example, 2, 3, 4, 5, 6, 7, 8, 9, 10, 20, 30 or more subjects), for example, two or more libraries from different subjects can be combined to from a library having members from more than one subject. In one embodiment, the subject is human having, or at risk of having, a cancer or tumor.

[0045] “Library-catch” refers to a subset of a library, for example, a subset enriched for preselected, undesired RNAs, for example, product captured by hybridization with preselected baits.

[0046] “Member” or “library member” or other similar term, as used herein, refers to a nucleic acid molecule, for example, a DNA, RNA, or a combination thereof, that is the member of a library. Typically, a member is a DNA molecule, for example, genomic DNA or cDNA. A member can be fragmented, for example, sheared or enzymatically prepared, genomic DNA. Members comprise sequence from a subject and can also comprise sequence not derived from the subject, for example, a non-target sequence such as adaptors sequence, a primer sequence, or other sequences that allow for identification, for example, “barcode” or “index” sequences.

[0047] “Next-generation sequencing or NGS or NG sequencing” as used herein, refers to any sequencing method that determines the nucleotide sequence of either individual nucleic acid molecules (for example, in single molecule sequencing) or clonally expanded proxies for individual nucleic acid molecules in a high through-put fashion (for example, greater than 10³, 10⁴, 10⁵ or more molecules are sequenced simultaneously). In one embodiment, the relative abundance of the nucleic acid species in the library can be estimated by counting the relative number of occurrences of their cognate sequences in the data generated by the sequencing experiment. Next generation sequencing methods are known in the art, and are described, for example, in Metzker, M. (2010) Nature Reviews Genetics 11:31-46, incorporated herein by reference.

[0048] The terms “nucleic acid” and “oligonucleotide,” as used herein, refer to polydeoxyribonucleotides (containing 2-deoxy-D-ribose), polyribonucleotides (containing D-ribose), and to any other type of polynucleotide that is an N glycoside of a purine or pyrimidine base. There is no intended distinction in length between the terms “nucleic acid”, “oligonucleotide” and “polynucleotide”, and these terms will be used interchangeably. These terms refer only to the primary structure of the molecule. Thus, these terms include double- and single-stranded DNA, as well as double- and single-stranded RNA. For use in the present invention, an oligonucleotide also can comprise nucleotide analogs in which the base, sugar or phosphate backbone is modified as well as non-purine or non-pyrimidine nucleotide analogs.

[0049] The term “nucleic acid target” refers to the nucleic acid having complementarity with a bait. For the purposes of this disclosure, a nucleic acid target is an undesired RNA sequence in a biological sample. Examples of an undesired RNA sequence include highly abundant RNA such as rRNA, tRNA, and other cellular RNAs that represent a significant fraction, e.g. at least about 5% 10% of the total RNA present in a biological sample. Examples of such other cellular RNAs include globin RNA from red blood cells and immunoglobulin RNA from B cells. Other examples include the mRNAs encoding beta-actin, GAPDH, cyclophilin, and other so-called “housekeeping genes” which are generally present at high levels in eukaryotic total RNA preparations, and which are generally not of interest for quantitative analysis using NGS or other methods.

[0050] Oligonucleotides can be prepared by any suitable method, including direct chemical synthesis by a method such as the phosphotriester method of Narang et al., 1979, Meth. Enzymol. 68:90-99; the phosphodiester method of Brown et al., 1979, Meth. Enzymol. 68:109-151; the diethylphosphoramidite method of Beaucage et al., 1981, Tetrahedron Lett. 22:1859-1862; and the solid support method of U.S. Pat. No. 4,458,066, each incorporated herein by reference. A review of synthesis methods of conjugates of oligonucleotides and modified nucleotides is provided in Goodchild, 1990, Bioconjugate Chemistry 1(3): 165-187, incorporated herein by reference.

[0051] “Plurality,” as used herein, means “at least two” or “two or more.”

[0052] The term “primer,” as used herein, refers to an oligonucleotide capable of acting as a point of initiation of DNA synthesis under suitable conditions. Such conditions include those in which synthesis of a primer extension product complementary to a nucleic acid strand is induced in the presence of four different nucleoside triphosphates and an agent for extension (e.g., a DNA polymerase or reverse transcriptase) in an appropriate buffer and at a suitable temperature. Primer extension can also be carried out in the absence of one or more of the nucleoside triphosphates in which case an extension product of limited length is produced. As used herein, the term “primer” is intended to encompass the oligonucleotides used in ligation-mediated reactions, in which one oligonucleotide is “extended” by ligation to a second oligonucleotide which hybridizes at an adjacent position. Thus, the term “primer extension”, as used herein, refers to both the polymerization of individual nucleoside triphosphates using the primer as a point of initiation of DNA synthesis and to the ligation of two oligonucleotides to form an extended product.

[0053] A primer is preferably a single-stranded DNA. The appropriate length of a primer depends on the intended use of the primer but typically ranges from 6 to 50 nucleotides, preferably from 15-35 nucleotides. Short primer molecules generally require cooler temperatures to form sufficiently stable hybrid complexes with the template. A primer need not reflect the exact sequence of the template nucleic acid, but must be sufficiently complementary to hybridize with the template. The design of suitable primers for the amplification of a given target sequence is well known in the art and described in the literature cited herein.

[0054] Primers can incorporate additional features which allow for the detection or immobilization of the primer but do not alter the basic property of the primer, that of acting as a point of initiation of DNA synthesis. For example, primers may contain an additional nucleic acid sequence at the 5′ end which does not hybridize to the nucleic acid target, but which facilitates cloning or detection of the amplified product. The region of the primer that is sufficiently complementary to the template to hybridize is referred to herein as the hybridizing region.

[0055] “Residue,” as used herein when referencing “DNA residues” or “RNA residues” in a nucleic acid molecule, refers to an internucleotide monomer comprising at least a nucleobase covalently bonded to a sugar moiety. An RNA molecule or DNA molecule, including modifications thereof, typically comprises a plurality of residues.

[0056] “Sample,” “tissue sample,” “patient sample,” “patient cell or tissue sample” or “specimen,” each refers to a collection of similar cells obtained from a tissue, or circulating cells, of a subject or patient. The source of the tissue sample can be solid tissue as from a fresh, frozen and/or preserved organ, tissue sample, biopsy, or aspirate; blood or any blood constituents; bodily fluids such as cerebral spinal fluid, amniotic fluid, peritoneal fluid or interstitial fluid; or cells from any time in gestation or development of the subject. The tissue sample can contain compounds that are not naturally intermixed with the tissue in nature such as preservatives, anticoagulants, buffers, fixatives, nutrients, antibiotics or the like. In one embodiment, the sample is preserved as a frozen sample or as formaldehyde- or paraformaldehyde-fixed paraffin-embedded (FFPE) tissue preparation. For example, the sample can be embedded in a matrix, for example, an FFPE block or a frozen sample.

[0057] The term “biological sample” refers to a material obtained from a biological source. Examples of a biological sample include a cell, a tissue, a fluid (for example, blood), an excrement (for examples, feces or urine), a biopsy, a swab, a skin scraping, among others. Biological samples include “Sample,” “tissue sample,” “patient sample,” “patient cell or tissue sample” or “specimen,” as those terms are used herein.

[0058] The term “tiling” refers to covering a specific region of a nucleic acid target with one or more baits through hybridization of the bait(s) to the nucleic acid target. The terms “1-fold tiling” or “100% tiling” refer to conditions enabling covering of an entire region, or most (>50%) of an entire region, of a nucleic acid target with a plurality of baits through hybridization of the plurality of baits to the nucleic acid target, wherein the plurality of baits can be aligned end-to-end along the complementary strand of the nucleic acid target and where all members of the plurality of baits can hybridize to the region of a nucleic acid target. The terms “n-fold tiling” or “n-fold redundant tiling” refer to conditions enabling covering of an entire region of a nucleic acid target with a plurality of baits through hybridization of the plurality of baits to the nucleic acid target, wherein the plurality of baits are separated by a spacing distance that is I/n times the average bait length along the complementary strand of the nucleic acid target and wherein at least n members of the plurality of baits have the ability to hybridize completely to the common inter-spacing region of the nucleic acid target. For example, 4-fold tiling using a plurality of baits having an average length of 120 nucleotides results in hybridization of the plurality of baits at a spacing of 30 nucleotides along a given region of the nucleic acid target, wherein at least four bait sequences have the ability to hybridize to the common inter-spacing region of the nucleic acid target. For example, 2-fold tiling using a plurality of baits having an average length of 120 nucleotides results in hybridization of the plurality of baits at a spacing of 60 nucleotides along a given region of the nucleic acid target, wherein at least two bait sequences have the ability to hybridize to the common inter-spacing region of the nucleic acid target. As used herein, when referring to hybridizing baits to a region of a nucleic acid target, “n-fold covering,” “n-fold coverage,” “n×coverage” “n×coverage strategy” and “n-fold tiling” have the same meanings are used interchangeably.

[0059] As used herein, “unmarked RNA” refers to a nucleic acid that is not modified or prepared to include a unique tag sequence or label enabling its detection. An example of an unmarked RNA includes an RNA from a biological sample.

[0060] As used herein, “marked RNA” refers to a nucleic acid that is modified or prepared to include a unique tag sequence or label enabling its detection. A marked RNA will typically have the same primary sequence of an unmarked RNA except for the inclusion of the unique tag sequence or label. A marked RNA can be obtained in a variety of ways, such as by IVT methods.

[0061] A “control nucleic acid sample” or “reference nucleic acid sample” as used herein, refers to nucleic acid molecules from a control or reference sample. Typically, it is DNA, for example, genomic DNA, RNA, or cDNA derived from RNA, not containing the alteration or variation in the gene or gene product. In certain embodiments, the reference or control nucleic acid sample is a wild type or a non-mutated sequence. In certain embodiments, the reference nucleic acid sample is purified or isolated (for example, it is removed from its natural state). In other embodiments, the reference nucleic acid sample is from a non-tumor sample, for example, a blood control, a normal adjacent tumor (NAT), or any other non-cancerous sample from the same or a different subject. In some embodiments, the reference nucleic acid sample can be a marked RNA that permits detection of the efficiency of a method for selecting an unmarked RNA.

[0062] “Sequencing” a nucleic acid molecule requires determining the identity of at least 1 nucleotide in the molecule. In embodiments the identity of less than all of the nucleotides in a molecule are determined. In other embodiments, the identity of a majority or all of the nucleotides in the molecule is determined.

[0063] Headings, for example, (a), (b), (i) etc., are presented merely for ease of reading the specification and claims. The use of headings in the specification or claims does not require the steps or elements be performed in alphabetical or numerical order or the order in which they are presented.

[0064] The present invention employs affinity-tagged DNA baits to remove highly abundant RNA (for example, rRNA) from a total RNA or other complex RNA sample. Methods have been described to employ affinity-tagged DNA baits to enrich DNA sequences from complex mixtures (see, for example, protocols and commercial products relating to xGen® Lockdown® Probes from Integrated DNA Technologies at: http://www.idtdna.com/pages/products/nextgen/target-capture/xgen-lockdown-probes). Also see U.S. patent application Ser. No. 13/935,451 (2013) (Behlke, M. A., Havens, J. R., Jarosz, M., Zwirko, Z., Lipson, D., and Juhn, F. S., TM-ENHANCED BLOCKING OLIGONUCLEOTIDES AND BAITS FOR IMPROVED TARGET ENRICHMENT IN MASSIVELY PARALLEL SEQUENCING EXPERIMENTS, and U.S. Provisional Application No. 61/745,435, filed Dec. 21, 2012, entitled “TM-ENHANCED BLOCKING OLIGONUCLEOTIDES AND BAITS FOR IMPROVED TARGET ENRICHMENT IN MASSIVELY PARALLEL SEQUENCING EXPERIMENTS,” by Behlke et al.).

[0065] Existing methods use DNA probes to enrich desired sequences by hybrid capture from DNA samples; the desired species are captured by the DNA baits, eluted, recovered, and used for downstream applications. In contrast, the present invention uses DNA probes to capture and remove unwanted RNA species, such as highly abundant rRNA, from RNA samples. In this case, the desired species are not captured by the DNA baits; instead, the unwanted species are captured by the DNA baits and are removed from the sample by affinity selection of the baits. The remaining material in the sample is thereby enriched for desired sequences by removing the undesired sequences from the complex mixture.

[0066] Referring to FIG. 1, the principle of selection and removal of undesired RNA sequences (for example, rRNA) with DNA baits is illustrated for a typical NGS application. Total RNA 101 (10 ng-10 g, typically around 1 μg) and biotinylated DNA oligonucleotide baits 102 are mixed together and briefly (for example, <5 minutes) heat-denatured at 60-95° C. in a suitable buffer mixture adjusted to include a final concentration of sodium chloride (for example, 400 mM) and Tris-CI pH 8 (for example, 10 mM) buffer or similar hybridization buffer (such as Saline Sodium Citrate buffer (SSC), TMAC (tetramethyl ammonium chloride)), with or without formamide, as are well known to those with skill in the art, followed by hybridization at about 50-70° C. for a period of time, then cooled to and maintained at room temperature for a period of time. Optimal hybridization temperature will vary with buffer composition and, for example, will be significantly lower when containing increasing amounts of formamide. The mixture containing DNA bait:rRNA complexes 103 is then incubated with streptavidin-magnetic beads 104 to permit capture of DNA bait:rRNA complexes 103. The remaining rRNA-depleted sample 105 is processed for cDNA synthesis and library preparation as appropriate for the sequence method employed.

[0067] Basic methods and protocols for capture can be similar or even identical to those employed for DNA capture as previously taught in the above cited prior art. It may be beneficial to adjust buffer composition or hybridization temperature for working with RNA capture owing to the potential complexity of RNA folding and competing RNA secondary structures that can reduce DNA bait hybridization to nucleic acid targets and subsequent RNA capture; such methods are well known to those with skill in the art. In the present invention, the captured material is discarded and the cleared total RNA sample is retained for future use. In preferred embodiments, the cleared total RNA is further purified and concentrated for future use. An example of method for further purification and concentration is by solid-phase extraction of the cleared RNA onto magnetic beads. Procedural details for magnetic-bead-based purification/concentration of nucleic acids are disclosed in the product literature for Mag-Bind RXNPure® Plus magnetic beads (cat #M 1386, Omega Bio-Tek).

[0068] Because captured material is discarded, DNA baits of captured material can be processed and recycled for use in subsequent RNA capture experiments depending upon the application. Thus, DNA baits of the present invention can afford certain additional economical advantages over the use of RNA baits for RNA capture.

[0069] DNA baits are typically synthesized with an affinity tag that permits capture of the bait:target complex. A preferred affinity tag includes biotin. Highly preferred DNA baits include biotin at both the 5′-terminus and the 3′ terminus of the oligonucleotide. Including biotin affinity tags at both termini can increase the efficiency with which the baits are captured onto the streptavidin magnetic beads, and also offer the advantage that the modifications at each terminus minimize the ability of excess baits to be ligated into the NGS library, thus reducing contamination of the library with bait sequences. The DNA baits can be made of a variety of lengths, wherein baits having a length from about 30 nucleotides to about 200 nucleotides being routine. DNA baits having a length of about 60-120 nucleotides are generally preferred. DNA baits having a length of about 60 nucleotides are especially preferred because the relatively short size maximizes their removal during the final purification steps used to recover the desired RNA in a pure, concentrated form. DNA baits typically include unmodified canonical nucleobases that are arranged in a primary sequence to enable hybridization to the nucleic acid target. Random “N-domain” region and/or the use of universal bases (for examples, inosine, 3-nitropyrrole, and 5-nitroindole, among others) can be employed to permit baits to hybridize and bind/capture targets bearing sequence polymorphisms (e.g., to make a single set of capture baits which will efficiently remove rRNA from RNA derived from a mixed bacterial population). Other affinity tags can be employed, as are well known to those with skill in the art. Affinity tags can be placed internally within the bait sequence, however it is generally preferred to place the tag modification at the 5′- or the 3′-end of the bait. It is more preferred to place the affinity tag at both the 5′- and 3′-ends.

[0070] Tₘ-enhanced oligonucleotides as DNA baits can be used as well; however, the cost of the synthetic Tₘ-enhanced nucleoside reagents necessary for preparing such Tₘ-enhanced DNA baits is more costly than conventional synthetic nucleoside reagents. For this reason, DNA baits prepared with conventional synthetic nucleoside reagents are generally preferred in the method disclosed herein. However, use of Tₘ-enhancing modifications may be beneficial to improve capture efficiency if the baits for are short, for example 20-40 nucleotides. Short baits may be desirable when high specificity of capture is required, for example, if it is desired to remove RNAs derived from one species but not a related species present in a mixed source RNA sample.

### Design of DNA Baits Against Exemplary RNA Targets

[0071] To prepare libraries for NGS from human RNA, DNA baits complementary to human cytoplasmic ribosomal 28S, 18S, 5S, and 5.8S RNA species as well as human mitochondrial ribosomal 16S and 12S RNA species preferably should be synthesized and employed; however, the bulk of rRNA sequences present in total RNA represent the human 28S and 18S species. Sequences of these rRNA species are shown in Appendix 1. A similar strategy can be employed to make bait pools for capture of other mammalian species, such as mouse, rat, monkey, etc. or non-mammalian species, such as worms, frog, fish, bird and prokaryotic or archaeal species.

[0072] Ribosomal RNAs are long, have subdomains with very high GC content, and naturally form highly complex, folded structures. These features make it difficult to design good capture probes/baits. However, it is not necessary to synthesize baits that span all complex, difficult regions. It is sufficient to synthesize baits which capture unique sequences that flank highly structured regions. Importantly, DNA baits inherently show lower hairpin and secondary structure formation than RNA baits, so DNA baits as described herein will perform better than the same sequences made as RNA baits (by, for example, IVT methods). Even so, the structure present in the rRNA target can render their capture inefficient. In this case, hybridization in buffers which normalize A:T vs. G:C base pair binding strength may be beneficial, such as tetramethyl ammonium chloride (TMAC) based buffer systems. Hybridization can also be driven to favor capture by providing the DNA capture baits at higher concentrations than the rRNA targets.

[0073] It is efficient to tile DNA baits end-to-end with no overlap for DNA exon capture purposes. DNA baits were designed using design criteria in place for design of IDT xGen® Lockdown® Probe DNA exon capture products. Appendix 2 shows sequences of the rRNA capture set using this approach and in Appendix 3 an edited set which eliminates domains having GC content >85%. It is expected that the probe set will improved synthesis quality and improved performance if probe GC content is kept at 85% or less. Appendix 4 shows sequences of the rRNA capture set designed using a 2× overlap strategy and in Appendix 5 an edited 2× overlap set which eliminates domains having GC content >85%. The 2× overlap set will likely show slightly higher clearance of rRNA, but it may not be necessary to use the extra probes present in this set.

[0074] The capture baits shown in Appendices 2-5 employ 120 nucleotide oligomers with a single 5′-biotin modification. This design has proven to be very effective as a tool for capture enrichment of target DNA sequences for NGS sequencing application; one version of this strategy is currently sold as Lockdown® Probes by Integrated DNA Technologies, Inc. (Coralville, Iowa (US)). For the capture-enrichment sequencing application, achieving high target specificity is highly desired; if target capture is less than 100% or less than 90% or less than 80%, and so on, there is little impact on the quality of NGS sequence data output. For the new rRNA clearance application of the present invention, achieving high capture efficiency is highly desired. Therefore capture rates above 80% are preferred, above 90% are more preferred, and approaching 100% are most preferred. Chemical synthesis of long capture baits is done preferably using a high efficiency synthesis platform, such as the Ultramer® manufacturing system in place at Integrated DNA Technologies, Inc. where coupling efficiency of each sequential base addition averages 99.5% or higher. Even with this very high coupling efficiency, a 120 nucleotide oligomer will be, on average, around 55% full-length product with the remaining 45% comprising all possible truncation products, most of which will be 5′-end capped via synthesis capping chemistry and will therefore not have a 5′-biotin ligand. These truncation failure products can hybridize to target RNA (e.g., rRNA) and can also remain as excess unhybridized oligomers. In either case, the oligomers lacking a biotin ligand will not be captured and cleared and therefore will remain in the RNA pool which is used to make an NGS sequencing library, making capture efficiency lower than desired and/or contributing directly to contamination of the NGS library. Use of purification methods, such as HPLC or PAGE, could be used to increase purity of the bait DNAs, however use of such methods adds to manufacturing time and cost and reduces yield.

[0075] As an alternative to purification, employing shorter baits, such as 60 nucleotide length, will result in oligomers having around 75% full-length product, leaving 25% truncated products lacking a 5′-biotin. Therefore making capture baits in this size range may be preferable to the longer 120 nucleotide capture baits for the present capture-removal application used in target enrichment methods. Even shorter baits can be employed, so long as hybridization conditions are adjusted for the lower binding affinity expected from shorter baits. Chemical modifications can be incorporated into the shorter baits to increase binding affinity and allow for use of bait pools having mixed sequence lengths so help normalize Tₘ between baits (e.g., 40 nucleotide baits, 60 nucleotide baits, and 120 nucleotide baits in a single pool, used in a single hybridization mixture under identical conditions).

[0076] As a further consideration, it is possible that some DNA baits used in rRNA capture/clearance, especially those baits which are not biotin end-modified, could remain in the RNA sample after SA-magnetic bead capture. Such sequences could become incorporated into the downstream NGS library and contribute to unwanted background sequencing reads. This possibility can be eliminated if the DNA baits are 3′-end blocked, preventing adaptor ligation and subsequent participation in library construction steps. An improved bait design would therefore comprise a “medium length” synthetic oligonucleotide, such as a 60 nucleotide oligomer (within a 40-80 nucleotide range is preferred) having both a 5′- and a 3′-biotin, or other capture ligand. This design provides a 3′-end block (e.g., the 3′-biotin group) and also has double biotin modification, which will ensure that almost all or all bait DNAs will have at least a single capture ligand present, maximizing clearance of bound rRNA molecules while at the same time preventing participation of residual DNA baits in NGS library construction. A set of 60 nucleotide dual-biotin DNA capture baits for rRNA clearance is shown in Appendix 6.

[0077] Other exemplary RNA targets that can be selected for removal according to the methods described herein include mRNAs encoding ribosomal RNA proteins (see Appendix 7). Appendix 8 shows sequences of the ribosomal protein mRNA capture set using the method of the present invention. Yet other exemplary RNA targets include highly abundant mRNAs encoding globins found in red blood cells (see Appendix 9). Appendix 10 shows sequences of the globin mRNA capture set using the method of the present invention.

[0078] Certain pol III transcripts like tRNA are considered as undesired RNA species owing to their abundance in total RNA. Yet the removal of tRNA from a total RNA population is customarily unnecessary for RNA-seq experiments in NGS applications, likely because the highly modified tRNA sequences are inefficiently copied into NGS libraries. Clearance of tRNA species is nevertheless included in the scope of the present invention, and may be of particular utility if downstream applications include sequencing methods that include short RNA fragments within this size range.

[0079] Further advantages are afforded by the use of baits whose structure and activity have been verified according to a standardized product specification with a quality control procedure. Though other procedures are available for preparing baits, it is preferable to prepare as a capture reagent a composition that includes a plurality of baits (that is, a set of discrete bait oligonucleotides), wherein each member of the plurality of baits is prepared individually.

[0080] As used in this context, the number of members of the plurality of bait oligonucleotides includes ranges from about 10 to about 100, from about 10 to about 1000, and from 10 to about 10,000. This range naturally varies with the application and the number and size of RNA species targeted for clearance. Even larger size bait sets, such as 10,000 to 100,000 or more, are commonly employed in positive selection methods, where the captured sequences are retained for downstream applications. Smaller bait sets, such as falling within ranges from about 10 to about 100, from about 10 to about 1000, and from 10 to about 10,000 are commonly employed in negative selection methods, where the captured sequences are discarded and the cleared sample is retained for downstream applications.

[0081] More preferably, each member of the plurality of baits is individually synthesized by a chemical process, wherein the quality of the product can be monitored during synthesis, after synthesis, and after optional purification. Even more preferably, each member of the plurality is prepared by a synthetic chemical process and purified, wherein both the quality of the synthesis and purification can be independently assessed. Most preferably, each member of the plurality of baits has an independent product specification from other members of the plurality of baits so that the plurality of baits can be obtained, wherein the structure and activity of each member is normalized relative to other members within the plurality of baits. The use of a plurality of baits having normalized activity enables more complete and uniform coverage of a given target of interest, particularly for targets having high GC-content regions. These advantages can be realized for oligonucleotide baits of all types.

[0082] Oligonucleotides that serve as baits include at least one modification that enables selection of bait:undesired RNA hybrids from the population of RNA templates 101 during hybrid capture. One example of a preferred modification includes biotin that can be incorporated into the oligonucleotide bait during chemical synthesis and used with solid support media containing or coupled to avidin or streptavidin for hybrid selection. Other capture ligands can be employed, such as digoxigenin or other groups as are well known to those with skill in the art.

### Nucleic Acid Samples

[0083] A variety of tissue samples can be the source of the nucleic acid samples used in the present methods. Total RNA can be isolated from a biological sample (for example, a tumor sample, a normal adjacent tissue (NAT), a blood sample, a sample containing circulating tumor cells (CTC) or any normal control)). In certain embodiments, the biological sample can be preserved as a frozen sample or as formaldehyde- or paraformaldehyde-fixed paraffin-embedded (FFPE) tissue preparation. For example, the sample can be embedded in a matrix, for example, an FFPE block or a frozen sample. The isolating step can include flow-sorting of individual chromosomes; and/or micro-dissecting a subject's sample (for example, a tumor sample, a NAT, a blood sample).

[0084] Protocols for RNA isolation are disclosed, for example, in the Maxwell® 16 Total RNA Purification Kit Technical Bulletin (Promega Literature #TB351, August 2009) and in the BiooPure RNA Isolation Reagent instruction manual (Bioo Scientific cat #5301). A widely used method for RNA isolation is disclosed in U.S. Pat. No. 4,843,155, Chomczynski P, “Product and process for isolating RNA” (1989).

[0085] The isolated nucleic acid samples (for example, total RNA samples) can be fragmented or sheared by practicing routine techniques. For example, genomic DNA can be fragmented by physical shearing methods, enzymatic cleavage methods, chemical cleavage methods, and other methods well known to those skilled in the art. For NGS RNA-Seq applications, typically intact total RNA is employed, optionally treated for enrichment using poly-T selection for poly-A RNA species or rRNA negative selection as taught herein, cDNA is made from the RNA, and shearing is done on the double-stranded cDNA species. Fragmentation may also be carried out on the input RNA prior to cDNA synthesis, for example using chemical fragmentation. The nucleic acid library can contain all or substantially all of the complexity of the transcriptome. The term “substantially all” in this context refers to the possibility that there can in practice be some unwanted loss of transcriptome complexity during the initial steps of the procedure. The methods described herein also are useful in cases where the nucleic acid library is a portion of the transcriptome, that is, where the complexity of the transcriptome is reduced by design. In some embodiments, any selected portion of the transcriptome can be selected for removal and clearance with the methods described herein.

[0086] Methods featured in the invention can further include isolating a nucleic acid sample to provide a library (for example, a nucleic acid library as described herein). For example, the nucleic acid sample used to generate the library includes RNA or cDNA derived from RNA. In some embodiments, the RNA includes total cellular RNA. In other embodiments, certain abundant RNA sequences (for example, ribosomal RNAs) have been depleted. In some embodiments, the poly(A)-tailed mRNA fraction in the total RNA preparation has been enriched. In some embodiments, the cDNA is produced by random-primed cDNA synthesis methods. In other embodiments, the cDNA synthesis is initiated at the poly(A) tail of mature mRNAs by priming by oligo(dT)-containing oligonucleotides. Methods for depletion, poly(A) enrichment, and cDNA synthesis are well known to those skilled in the art.

[0087] The method can further include amplifying the nucleic acid sample by specific or non-specific nucleic acid amplification methods that are well known to those skilled in the art. In some embodiments, certain embodiments, the nucleic acid sample is amplified, for example, by whole-genome amplification methods such as random-primed strand-displacement amplification.

[0088] The nucleic acid sample used to generate the library can also include RNA or cDNA derived from RNA. In some embodiments, the RNA includes total cellular RNA. In other embodiments, certain abundant RNA sequences (for example, ribosomal RNAs) have been depleted. In other embodiments, the poly(A)-tailed mRNA fraction in the total RNA preparation has been enriched. In some embodiments, the cDNA is produced by random-primed cDNA synthesis methods. In other embodiments, the cDNA synthesis is initiated at the poly(A) tail of mature mRNAs by priming by oligo(dT)-containing oligonucleotides. Methods for depletion, poly(A) enrichment, and cDNA synthesis are well known to those skilled in the art.

[0089] The method can further include amplifying the nucleic acid sample by specific or non-specific nucleic acid amplification methods that are known to those skilled in the art. The nucleic acid sample can be amplified, for example, by whole-genome amplification methods such as random-primed strand-displacement amplification.

[0090] The nucleic acid sample can be fragmented or sheared by physical or enzymatic methods as described herein, and ligated to synthetic adaptors, size-selected (for example, by preparative gel electrophoresis) and amplified (for example, by PCR). The fragmented and adaptor-ligated group of nucleic acids is used without explicit size selection or amplification prior to hybrid selection.

### Hybridization Conditions

[0091] The methods featured in the present invention include the step of contacting the target sample (for example, a total RNA sample, an NGS library, or other heterogeneous mixture) with a plurality of baits to first hybridize to unwanted RNA species and then remove unwanted captured RNA species. The contacting step can be effected in solution hybridization. In certain embodiments, the method includes repeating the hybridization step by one or more additional rounds of solution hybridization. In some embodiments, the methods further include subjecting the library hybridization/capture to one or more additional rounds of solution hybridization with the same or different collection of baits.

[0092] Variations in efficiency of selection can be adjusted by altering the concentration of the baits and the composition of the hybridization solution. In one embodiment, the efficiency of selection is adjusted by leveling the efficiency of individual baits within a group (for example, a first, second or third plurality of baits) by adjusting the relative abundance of the baits, or the density of the binding entity (for example, the hapten or affinity tag density) in reference to differential sequence capture efficiency observed when using an equimolar mix of baits, and then introducing a differential excess as much of internally-leveled group 1 to the overall bait mix relative to internally-leveled group 2.

[0093] In certain embodiments, the methods described herein can achieve high coverage of the sequences targeted for removal. In one embodiment, the percent of target bases complementary to bait probes is about 50%, or about 60%, or about 70%, or about 80%, or about 90%, or about 100%. Regions of a target nucleic acid not directly complementary to bait probes can be depleted so long as said regions are linked (e.g. are an adjacent sequence) to a target sequence complementary to a bait. This feature of the system can assist with capture depletion of targets such as the human 28S rRNA without having to provide 100% coverage of the target in the bait pool. This target has local regions with >85% GC content and these areas are prone to form highly stable secondary structures which are difficult to invade for probe hybridization. Further, these sequences can also be difficult for chemical synthesis. Making a probe pool that excludes these regions can improve quality of the bait set and yet still result in efficient capture of the entire target.

[0094] Prior to hybridization, baits can be denatured according to methods well known in the art.

[0095] In general, hybridization steps include contacting DNA bait composition under hybridizing conditions with the target sequences to be removed and depleting those sequences after hybridization/binding of the bait composition to the target.

[0096] Baits are hybridized or annealed to the target sequences under hybridizing conditions. “Hybridizing conditions” are conditions that facilitate annealing between a bait and a nucleic acid target. Since annealing of different baits will vary depending on probe length, base composition and the like, annealing is facilitated by varying bait concentration, hybridization temperature, salt concentration and other factors well known in the art.

[0097] Varying parameters, such as the concentrations, base compositions, complexities, and lengths of the baits, the tiling extents, as well as salt concentrations, temperatures, and length of incubation, facilitates identification of optimal hybridization conditions. For example, hybridizations can be performed in hybridization buffer containing 5×SSPE, 5×Denhardt's solution, 5 mM EDTA and 0.1% SDS and blocking DNA to suppress non-specific hybridization. Alternatively, hybridization can be performed in 5×SSC. In other embodiments, the hybridizations can be performed in a buffer containing tetramethyl ammonium chloride (TMAC), such as are well known to those with skill in the art. One embodiment of the invention involves use of an optimized hybridization buffer that minimizes the Tₘ difference between oligonucleotides of different sequence. In the buffer system described herein, hybridization is regulated more by the length of matched base pairs present between probe and target such that the effects of mismatches are magnified while variations in sequence which do not contribute to mismatch are minimized. In one embodiment, the hybridization buffer is a combination of Tris at a pH around 8; EDTA; Sarkosyl; Ovalbumin; CTAB; Ficoll Type 400; PVP-360; tetramethyl ammonium chloride (TMAC); and blocking DNA; optionally, formamide can be added to adjust optimal hybridization temperature. In another embodiment, the composition of the hybridization buffer is: 37.5 mM Tris pH 8, 3 mM EDTA, 0.25% Sarkosyl, 0.4 mg/mL Ovalbumin, 1 mM CTAB, 0.4 mg/mL Ficoll Type 400, 0.4 mg/mL PVP-360, 2.5M TMAC, 10 μg/mL denatured/sheared salmon sperm DNA; optionally, formamide can be added up to a final concentration of 50%. See also methods disclosed by Goldrick for hybridization and capture buffer compositions and protocols (US Patent Application, Goldrick et al., METHODS AND COMPOSITIONS FOR IMPROVING REMOVAL OF RIBOSOMAL RNA FROM BIOLOGICAL SAMPLES, US 2014/0295418).

[0098] In general, hybridization conditions, as described above, include incubation for periods ranging from about 10 minutes to about 30 minutes to about 1 hour to about 4 hours to about 24 hours at temperatures ranging from about 20° C. (for example RT) to about 70° C., more typically about 60° C., depending on the precise composition of the hybridization buffer. Hybridization can optionally be performed in sequential steps where incubation temperature is shifted or ramped between temperatures. For example, a hybridization can be performed for 10 minutes at 60° C. followed by 15 minutes at 37° C.

[0099] Marked RNAs can be used to assess the efficiency of selection and removal of undesired RNAs. A marked RNA can be prepared that corresponds to the unmarked RNA species targeted to a DNA bait set. The marked RNA can include a label to enable its detection in the total RNA sample before and after hybridization to the DNA bait set and removal using a suitable capture reagent directed to the DNA bait affinity tag. A total RNA sample can be spiked with a known amount of the marked RNA. The extent of selection and removal of the unmarked RNA can be assessed by quantitating the respective amounts of marked RNA present in the captured RNA fraction as compared to the non-captured RNA fraction (that is collective fraction that includes the supernatant and post-bead wash fractions). Thus, different empirical parameters can be rapidly assessed to identify specific conditions that yield efficient hybrid selection and removal of the undesired RNA species.

[0100] The methods described herein are adaptable to standard liquid handling methods and devices. In some embodiments, the method is carried out using automated liquid handling technology as is known in the art, such as devices that handle multiwell plates (see for example, Gnirke, A. et al. (2009) Nat Biotechnol. 27(2):182-189). This can include, but not limited to, automated library construction, and steps of solution hybridization including set-up and post-solution hybridization washes. For example, an apparatus can be used for carrying out such automated methods for the bead-capture step after the solution hybridization reaction. Exemplary apparatus can include, but is not limited to, the following positions: a position for a multi-well plate containing streptavidin-coated magnetic beads, a position for the multiwall plate containing the solution hybrid-selection reactions, I/O controlled heat blocks to preheat reagents and to carry out hybridization and/or washing steps at a user-defined temperature, a position for a rack of pipet tips, a position with magnets laid out in certain configurations that facilitate separation of supernatants from magnet-immobilized beads, a washing station that washes pipet tips and disposed of waste, and positions for other solutions and reagents. In one embodiment, the apparatus is designed to process up to 96 depletions including the bait+RNA hybridization step, the streptavidin bead-capture step, through the final desired RNA clean-up and concentration step in parallel. In another embodiment, one or more positions have a dual function. In yet another embodiment, the user is prompted by the protocol to exchange one plate for another. In such automated systems, the devices are configured to capture the post-streptavidin bead capture supernatant fraction for further collection and processing, as the non-captured RNA includes the desired RNA species of the present method. In yet another embodiment, the automated system is configured to insert a magnet into the vessel containing the solution hybridization reaction and the affinity-coated magnetic beads (for example, streptavidin-coated magnetic beads), for the purpose of attracting said magnetic beads, wherein the magnetic beads are linked through the affinity group to the bait oligonucleotides containing a capture moiety (for example, biotin), and wherein a subset of the bait oligonucleotides are hybridized to nucleic acid targeted for removal (for example, ribosomal RNA).

[0101] In one embodiment, the selected subgroup of nucleic acids are amplified (for example, by PCR) prior to being analyzed by sequencing or genotyping. In another embodiment, the subgroup is analyzed without an amplification step, for example, when the selected subgroup is analyzed by sensitive analytical methods that can read single molecules.

### Sequencing

[0102] Any method of sequencing can be used. Sequencing of nucleic acids isolated by selection methods are typically carried out using next-generation sequencing (NGS). Next-generation sequencing includes any sequencing method that determines the nucleotide sequence of either individual nucleic acid molecules or clonally expanded proxies for individual nucleic acid molecules in a highly parallel fashion (for example, greater than 10⁵ molecules are sequenced simultaneously). In one embodiment, the relative abundance of the nucleic acid species in the library can be estimated by counting the relative number of occurrences of their cognate sequences in the data generated by the sequencing experiment. Next generation sequencing methods are known in the art, and are described, for example, in Metzker, M. (2010) Nature Reviews Genetics 11:31-46, incorporated herein by reference.

[0103] In one embodiment, the next-generation sequencing allows for the determination of the nucleotide sequence of an individual nucleic acid molecule (for example, Helicos BioSciences' HeliScope Gene Sequencing system, and Pacific Biosciences' PacBio RS system). In other embodiments, the sequencing method determines the nucleotide sequence of clonally expanded proxies for individual nucleic acid molecules (for example, the Solexa sequencer, Illumina Inc., San Diego, Calif.; 454 Life Sciences (Branford, Conn.), and Ion Torrent). For example, massively parallel short-read sequencing (for example, the Solexa sequencer, Illumina Inc., San Diego, Calif.), which generates more bases of sequence per sequencing unit than other sequencing methods that generate fewer but longer reads. Other methods or machines for next-generation sequencing include, but not limited to, the sequencers provided by 454 Life Sciences (Branford, Conn.), Applied Biosystems (Foster City, Calif.; SOLiD sequencer), Helicos BioSciences Corporation (Cambridge, Mass.), and emulsion and microfluidic sequencing technology nanodroplets (for example, GnuBio droplets).

[0104] Platforms for next-generation sequencing include, but are not limited to, Roche/454's Genome Sequencer (GS) FLX System, Illumina/Solexa's Genome Analyzer (GA), Life/APG's Support Oligonucleotide Ligation Detection (SOLiD) system. Polonator's G.007 system, Helicos BioSciences' HeliScope Gene Sequencing system, and Pacific Biosciences' PacBio RS system.

[0105] NGS technologies can include one or more of steps, for example, template preparation, sequencing and imaging, and data analysis.

[0106] Additional exemplary sequencing methodologies are known in the art, for example, some of which are described in commonly owned, U.S. Ser. No. 13/339,986 and PCT/US11/67725, both filed on Dec. 29, 2011, the contents of which are incorporated by reference.

### EXAMPLES

[0107] The present invention is additionally described by reference to the following Examples, which are offered by way of illustration and are not intended to limit the invention in any manner. Standard techniques well known in the art or techniques specifically described below can be utilized.

### Example 1

### Hybridization of DNA Baits to Total RNA

[0108] The present example demonstrates hybridization of the synthetic DNA capture baits to rRNA present in a total RNA sample.

[0109] Five samples were prepared, each containing 1 g of total RNA extracted from cultured human cells (HEK293T) using the BiooPure RNA Isolation reagent (Bioo Scientific Corp., Austin, Tex. (US)) modified to allow the RNA to be recovered using solid phase extraction onto magnetic beads. The RNA was hybridized as described in the specification to different amounts of a mixture of human rRNA biotinylated bait oligonucleotides (Appendix 6), each of which was 60 nucleotides in length with biotin modification at both the 3′- and 5′-ends. The final bait pool reagent contained a final concentration of 100 μm oligonucleotide capture baits comprising 0.87 μM of each of the 106 somatic rRNA specific baits and 0.17 μM of each of the 42 mitochondrial rRNA specific baits (Appendix 6). The final amount of pooled oligonucleotide baits was 1.9 μg per μL of bait mixture. The amounts of bait mixture used in each hybridization are shown in Table 1.

TABLE 1
Amounts of rRNA baits used in capture/gelshift assays

| Total human RNA | Bait mixture | Lane on gel (FIG. 2) |
|---|---|---|
| 1 μg | 0.25 μL | 1 |
| 1 μg | 0.5 μL | 2 |
| 1 μg | 1.0 μL | 3 |
| 1 μg | 1.5 μL | 4 |
| 1 μg | — | 5 |

[0110] The RNA samples and bait pool were combined into a total final volume of 30 μL of a hybridization solution containing 10 mM Tris pH 8, 400 mM NaCl and incubated for 10 minutes at 60° C. and then for 15 minutes at 37° C.

[0111] Following hybridization, the nucleic acid species were separated on a 2% agarose gel prepared and run in the presence of ethidium bromide to allow staining and detection of the RNA (FIG. 2). The control sample in lane 5 shows the positions of the 18S and 28S ribosomal RNA bands in the absence of hybridization to bait. The remaining lanes show an upward shift in mobility of the 18S and 28S bands after hybridization to the bait pool corresponding to the increase in molecular weight of the rRNA:bait complex compared with native rRNA. The increased intensity of bands in hybridized samples reflects the increased binding of ethidium bromide to double-stranded nucleic acid compared to single-stranded nucleic acid (in this case the rRNA:DNA heteroduplexes). The diffuse low molecular weight material in lanes 3 and 4 comprises excess unhybridized bait. The gel image shows the rRNA bands are maximally up-shifted using 0.5 μL of the bait pool per 1 μg total RNA. As bait concentration is further increased, no additional upward molecular weight shift is observed and excess non-hybridized low molecular weight baits are seen at the bottom of the gel. This example demonstrates efficient hybridization of baits to the rRNA target is achieved under conditions employed and that 0.5 μL of the bait pool is sufficient to fully bind the rRNA present in 1 lag total human RNA.

### Example 2

### Removal of rRNA:bait Complexes Using Streptavidin (SA) Magnetic Beads

[0112] The present example demonstrates clearance of rRNA:bait complexes from a total RNA sample using magnetic SA beads.

[0113] Six samples were prepared, each containing 1 μg of total RNA extracted from cultured human cells (HEK293T) using the BiooPure RNA Isolation reagent (Bioo Scientific Corp., Austin, Tex. (US)) modified to allow the RNA to be recovered using solid phase extraction onto magnetic beads. The RNA was hybridized as described in the specification to different amounts of a mixture of human rRNA biotinylated bait oligonucleotides (Appendix 6), each of which was 60 nucleotides in length with biotin modification at both the 3′- and 5′-ends. The final bait pool reagent contained a final concentration of 100 μM oligonucleotide capture baits comprising 0.87 μM of each of the 106 somatic rRNA specific baits and 0.17 μM of each of the 42 mitochondrial rRNA specific baits (Appendix 6). The final amount of pooled oligonucleotide baits was 1.9 μg per μL of bait mixture. The amounts of bait mixture used in each hybridization are shown in Table 2.

TABLE 2
Amounts of rRNA baits used in SA-magnetic bead reactions

| | | | Lane |
|---|---|---|---|
| Total human RNA | Bait mixture | SA magnetic beads | on gel (FIG. 2) |
| 1 μg | 0.25 μL | 20 μL | 1 |
| 1 μg | 0.25 μL | 30 μL | 2 |
| 1 μg | 0.5 μL | 20 μL | 3 |
| 1 μg | 0.5 μL | 30 μL | 4 |
| 1 μg | 0.25 μL | — | 5 |
| 1 μg | 0.5 μL | — | 6 |

[0114] The RNA samples and bait pool were combined into a total final volume of 30 μL of a hybridization solution containing 10 mM Tris pH 8, 400 mM NaCl and incubated for 10 minutes at 60° C. and then for 15 minutes at 37° C.

[0115] Prior to use, streptavidin magnetic beads obtained from Solulink (NanoLink Streptavidin magnetic beads, cat #M-1002) were prepared by adding 20 (or 30) μL of well-mixed beads to 0.5 mL of Bead Wash Solution (150 mM NaCl/5 mM Tris pH 7.5/2 mM EDTA), vortex mixed, then attracted to a magnet by placing the vessel containing the beads and wash solution in contact with said magnet for 1 minute and removing the fluid without disturbing the beads on the vessel wall. The vessel was removed from the magnetic stand and the beads resuspended in 20 μL of Bead Hybridization Solution, said Bead Hybridization Solution having a composition disclosed in U.S. Patent Application Publication US20140295418 to Goldrick et al., “METHODS AND COMPOSITIONS FOR IMPROVING REMOVAL OF RIBOSOMAL RNA FROM BIOLOGICAL SAMPLES.” In a preferred embodiment, the composition of said Bead Hybridization Solution was 300 mM NaCl, 10 mM MgCl₂, 5% Polyethylene Glycol mw 8000. Components of the Bead Hybridization Solution may be obtained from Sigma Chemical Co.

[0116] At the end of the hybridization period, 20 tμL of prepared magnetic beads (prepared from 20 μL or 30 μL of Nanolink beads) in Bead Hybridization Solution were added to the vessel containing the 30 μL hybridization reaction and, after vortex mixing, the reaction was incubated at room temperature for 15 minutes to allow binding to occur between the biotin on the hybridized template:bait complexes and the streptavidin on the beads. Following the incubation period, the streptavidin beads along with biotinylated bait oligos and associated nucleic acid hybridized to the bait, were removed by inserting a rod magnet into the reaction vessel. One suitable rod magnet is a neodymium-iron-boron rare-earth magnet that is 25.4 mm in length and having a diameter of 3.2 mm (Magcraft, Vienna, Va.; part #NSNO750/N40). For ease of handling, one end of the rod magnet was connected to a pipet tip by inserting it into the narrow end of a standard P-200 tip. The rod magnet was inserted into the vessel to a level of about 1 mm-2 mm beneath the surface of the reaction components, for a duration of about 5 seconds. This interval is sufficient to allow the magnetic beads and associated reaction components to be attracted to the tip of the rod magnet. The rod magnet was then withdrawn from the vessel, removing the SA-magnetic beads and bound rRNA:bait complexes, leaving the desired RNA not targeted for removal in the vessel. The magnetic beads and associated components were removed from the rod magnet by wiping the tip of the magnet with a tissue (for example a KimWipe), in order to re-use the rod magnet for processing subsequent samples. After wiping the rod magnet to remove the beads, the rod magnet was further cleaned by rinsing in ethanol.

[0117] Following removal of the SA-magnetic beads and rRNA:bait complexes, the remaining nucleic acid species were separated on a 1% agarose gel prepared and run in the presence of ethidium bromide to allow staining and detection of the RNA (FIG. 3). The control samples in lanes 5 and 6 did not undergo SA-magnetic bead binding and show the positions of the 18S and 28S ribosomal RNA bands complexed to the biotinylated bait oligonucleotides. Lanes 1-4 show the remaining RNA left after rRNA removal by bait capture. Essentially, no RNA is visible in these lanes, consistent with near total elimination of the rRNA species. The remaining mRNA (spread over a molecular weight range of <500 to >10,000 nucleotides) is not visible when using this detection method when starting with the low input amount of total RNA employed. This example demonstrates efficient removal of the rRNA target is achieved under conditions employed and that 20 μL of the SA-magnetic beads is sufficient to fully bind 0.5 μL of bait pool.

### Example 3

### Depletion of rRNA from RNA-Seq Libraries

[0118] The present example demonstrates clearance of rRNA from RNA-Seq libraries using biotinylated baits and SA-magnetic beads.

[0119] Total RNA was extracted from cultured human cells (HEK293T) using the BiooPure RNA Isolation reagent (Bioo Scientific Corp., Austin, Tex. (US)). The RNA (1 μg or 3 μg) was hybridized as described in the specification to 3 μL of a mixture of human rRNA biotinylated bait oligonucleotides (Appendix 3), each of which was 120 nucleotides in length biotin with 5′-biotin. The final bait pool reagent contained equimolar amounts of capture oligonucleotides complementary to human cytoplasmic rRNA species at a concentration of 27 μM (approximately 1 mg per mL) and mitochondrial ribosomal RNAs at 1/10 this concentration, 2.7 μM (approximately 0.1 mg per mL). The amounts of bait mixture used in each hybridization were are shown in Table 2. A 3 μg control RNA samples was mock treated, meaning it was processed through the method without the addition of capture baits to the hybridization mixture.

[0120] The RNA samples and bait pool were combined into a total final volume of 50 μL of a hybridization solution containing 10 mM Tris pH 8, 400 mM NaCl and incubated for 10 minutes at 60° C. and then for 20 minutes at room temperature.

[0121] Streptavidin magnetic beads (Solulink NanoLink Streptavidin magnetic beads, cat #M-1002) were prepared as described in Example 2. Each of the 3 RNA samples were mixed with 35 μL of SA-magnetic beads and incubated for 15 minutes at room temperature. The beads were attracted to a magnet for 4 minutes and liquid was removed to a fresh tube. The fluid from samples that had been hybridized to biointylated baits should be enriched for mRNA and depleted of rRNA while the fluid from the mock-treated sample should contain total RNA, including the undesired rRNA. The samples were then treated with DNase by combining each with 15 μL of 10× DNase buffer (0.2 M Tris pH 8, 20 mM MgCl₂, 10 mM CaCl₂), 48 μL water, and 2 μL DNase 1 (Sigma cat#D5319, ˜5,000 Kunitz units/mg protein) and incubated for 20 minutes at 37° C. The DNase was then inactivated by combining each sample with 8 μL of 0.5 M EDTA and incubating for 5 minutes at 70° C. The treated samples were purified by combining each with 220 μL magnetic beads (Omega Bio-tek Mag-Bind EZ Pure), incubating 10 minutes at room temperature, attracting the beads to magnet and removing fluid, washing the beads twice with 0.5 ml 75% ethanol, and eluting the bound RNA by resuspending the beads in 50 μL of 0.1 mM EDTA, storing for 2 minutes at room temperature, attracting to a magnet for 2 minutes, and transferring the fluid to a fresh tube. The RNA was then used as input for making RNA-Seq libraries using the NEXTflex nondirectional RNASeq kit (Bioo Scientific Corp. cat #5129). The libraries were amplified for 15 cycles of PCR.

[0122] The 3 NGS libraries (3 μg depleted, 1 μg depleted, and 3 μg control non-depleted) were pooled and sequenced on an Illumina MiSEQ instrument using the V2 kit with 75×75 cycles. Sample identity was tracked by bar codes (CTTGTA, ATCACG, and TTAGGC) using established methods. Reads were mapped to the human genome and binned into 3 categories: 1) rRNA sequence, 2) human genome, not rRNA, and 3) does not map to the human genome. Results are shown in Table 3 and are graphically plotted in FIG. 4.

TABLE 3
Results of rRNA clearance from NGS RNA-Seq libraries

| | 3 μg RNA | 1 μg RNA | 3 μg RNA |
|---|---|---|---|
| | depleted | depleted | not depleted |
| rRNA | 12% | 6% | 76% |
| Human, not rRNA | 85% | 92% | 22% |
| unmapped | 3% | 2% | 2% |

[0123] Consistent with expectation, RNA-Seq performed on untreated human total RNA showed a large fraction of the sequencing reads mapped to rRNA genes with only 22% of reads representing useful sequence. In contrast, the 1 μg depleted sample showed 92% useful sequencing reads and the 3 g depleted sample showed 85% useful sequencing reads. The higher amount of residual rRNA present in the 3 μg depleted sample relative to the 1 μg depleted sample suggests that the amount of bait employed was insufficient for clearing rRNA sequences from the larger amount of total RNA. Better results would be expected if additional bait was used, in a similar ratio to that employed in the 1 μg depleted sample.

### Example 4

### Depletion of rRNA from Total RNA without DNase Treatment

[0124] Many protocols employ a DNase treatment to eliminate residual DNA capture baits and prevent these sequences from contaminating downstream PCR or NGS assays. The 60 nucleotide dual-biotin baits (Appendix 6) should have minimal risk to give false signals in such downstream applications, due to their shorter length and chemical end-blocking groups. The present example demonstrates a DNase-free processing method.

[0125] Total human cellular RNA samples (2 μg) were hybridized with 1 μL of the 60-nucleotide dual-biotin bait pool (see Examples 1 and 2, sequences from Appendix 6) in oligo hybridization buffer (400 mM NaCl, 10 mM Tris pH 8) in a final volume of 30 μL for 10 minutes at 60° C. and then for 15 minutes at 37° C. A control mock-hybridized preparation was assembled and treated in the same way, except that bait probes were not added. Each reaction was then individually mixed with 30 μL of prepared streptavidin-conjugated magnetic beads (NanoLink™ beads, Solulink). Beads were prepared by vortexing in 0.5 ml of Bead Wash (150 mM NaCl, 5 mM Tris pH 7.5, 2 mM EDTA), attracting to a magnet for 2 minutes, removing the wash solution, and resuspending the bead pellet in 30 μL of Bead Hyb solution (300 mM NaCl, 16% PEG 8000). The reactions were incubated at room temp for 15 minutes without agitation (no agitation was necessary since the beads remained suspended), then the reactions were placed on a magnetic stand for 3 minutes to concentrate the bead and the fluid removed. Half of each sample was separated on a 2% agarose gel with ethidium bromide and visualized by UV-induced fluorescence. The gel image is shown in FIG. 5. Lane 1 shows the sample which underwent rRNA clearance and no evidence for remaining rRNA is seen. Other cellular RNAs are present (such as mRNAs), but are not visualized using this approach due to the low amount of material present (see detection of GAPDH mRNA in Example 5). Lane 2 shows the mock-treated sample, which shows the rRNA present in total RNA and also demonstrates that the procedure does not degrade the RNA.

### Example 5

### Depletion of rRNA from Total RNA Measured by RT-PCR

[0126] The present example demonstrates clearance of rRNA from total RNA assessed using RT-PCR assays for human cytoplasmic and mitochondrial rRNA using the DNase-free processing method.

[0127] Total human cellular RNA (2 μg) was hybridized with 1 μL of the 60-nucleotide dual-biotin bait pool (see Examples 1 and 2, sequences from Appendix 6) in oligo hybridization buffer (400 mM NaCl, 10 mM Tris pH 8) in a final volume of 30 μL for 10 minutes at 60° C. and then for 15 minutes at 37° C. A control mock-hybridized preparation was assembled and treated in the same way, except that the bait probes were not added. Each reaction was then individually mixed with 30 j±L of prepared streptavidin-conjugated magnetic beads (NanoLink™ beads, Solulink). Beads were prepared by vortexing in 0.5 ml of Bead Wash (150 mM NaCl, 5 mM Tris pH 7.5, 2 mM EDTA), attracting to a magnet for 2 minutes, removing the wash solution, and resuspending the bead pellet in 30 μL of Bead Hyb solution (300 mM NaCl, 16% PEG 8000). The reactions were incubated at room temp for 15 minutes without agitation (no agitation was necessary since the beads remained suspended), then the reactions were placed on a magnetic stand for 3 minutes to concentrate the bead and the fluid removed.

[0128] Aliquots (5 μL) of the rRNA-depleted and mock-depleted samples were converted to cDNA by reverse transcription using M-MLV reverse transcriptase in 20 μL reactions according to standard protocols. The reactions were diluted with 90 μL of water; 4 μL of each diluted reverse-transcription reactions was used as template for PCR reactions (20 μL) with primers indicated in Table 4. The reactions that employed rRNA primers were run for 20 cycles. The reactions that employed GAPDH primers were run for 28 cycles. The PCR reactions were separated on a 2% agarose gel in the presence of ethidium bromide and visualized by UV-induced fluorescence. A gel image is shown in FIG. 6. Reactions are summarized, including primer sequences, in Table 4.

TABLE 4
RT-PCR reactions efficiency
of rRNA clearance

| FIG. | | | | | |
|---|---|---|---|---|---|
| 5 | Human | | | | SEQ |
| gel | total | Bait | | Primer | ID |
| lane | RNA | Pool | Target | Seq | No. |
| 1 | 2 μg | 1 μL | Mitochondrial | 12S For: AGACCCA | 1 |
| | | | 12S rRNA | AACTGGGATTAGATAC | |
| 2 | 2 μg | — | | 12s Rev: TTAAGCT | 2 |
| | | | | GTGGCTCGTAGTG | |
| 3 | 2 μg | 1 μL | Mitochondrial | 16S For: AAAGAGC | 3 |
| | | | 16S rRNA | ACACCCGTCTATG | |
| 4 | 2 μg | — | | 16S Rev: TCTTGGA | 4 |
| | | | | CAACCAGCTATCAC | |
| 5 | 2 μg | 1 μL | Human | 18S For: GCGGTAA | 5 |
| | | | 18S rRNA | TTCCAGCTCCAATAG | |
| 6 | 2 μg | — | | 18S Rev: CCGCTCC | 6 |
| | | | | CAAGATCCAACTA | |
| 7 | 2 μg | 1 μL | Human | 28S For: CGTCGTG | 7 |
| | | | 28S rRNA | AGACAGGTTAGTTT | |
| 8 | 2 μg | — | | 28S Rev: CCTCAGC | 8 |
| | | | | CAAGCACATACA | |
| 9 | 2 μg | 1 μL | GAPDH | GAPDH For: ACACC | 9 |
| | | | | CACTCCTCCACCTTT | |
| 10 | 2 μg | — | | GAPDH Rev: TGCTG | 10 |
| | | | | TAGCCAAATTCGTTG | |

[0129] Using RT-PCR, it is clear that the rRNA clearance method of the present invention largely removed rRNA from a total RNA sample. The four rRNA-specific RT-PCR assays show little if any detectable residual rRNA amplicon (lanes 1, 3, 5, and 7) compared to the strong amplicon seen with mock-depletion (lanes 2, 4, 6, and 8). In comparison, an RT-PCR assay specific for GAPDH mRNA shows no difference between depleted (lane 9) and mock-depleted (lane 10) samples, consistent with the depletion method removing rRNA with little to no effect on other cellular RNA species.

### INCORPORATION BY REFERENCE

[0130] All publications, patents, and patent applications mentioned herein are hereby incorporated by reference in their entirety as if each individual publication, patent or patent application was specifically and individually indicated to be incorporated by reference. In case of conflict, the present application, including any definitions herein, will control.

[0131] Also incorporated by reference in their entirety are any polynucleotide and polypeptide sequences which reference an accession number correlating to an entry in a public database, such as those maintained by The Institute for Genomic Research (TIGR) on the world wide web at tigr.org and/or the National Center for Biotechnology Information (NCBI) on the world wide web at ncbi.nlm.nih.gov.

[0132] The terminology used herein is for the purpose of describing particular embodiments only, and is not intended to be limiting. With respect to the use of substantially, any plural and/or singular terms herein, those having skill in the art can translate from the plural as is appropriate to the context and/or application. The various singular/plural permutations may be expressly set forth herein for the sake of clarity.

[0133] While the present invention has been described with reference to certain embodiments, it will be understood by those skilled in the art that various changes may be made and equivalents may be substituted without departing from the scope of the present invention. In addition, many modifications may be made to adapt a particular situation or material to the teachings of the present invention without departing from its scope. Therefore, it is intended that the present invention not be limited to the particular embodiments or examples disclosed, but that the present invention will include all embodiments falling within the scope of the appended claims.

APPENDIX 1
rRNA Sequences to use for capture bait design

Homo sapiens RNA, 28S ribosomal 5 (RNA28S5), ribosomal RNA (SEQ ID NO: 11)
NCBI Reference Sequence: NR_003287.2

| LOCUS | NR_003287 5070 bp rRNA linear PRI 16-JUL-2013 |
|---|---|
| DEFINITION | Homo sapiens RNA, 28S ribosomal 5 (RNA28S5), ribosomal RNA. |
| ACCESSION | NR_003287 |
| VERSION | NR_003287.2 GI: 225637499 |
| KEYWORDS | RefSeq. |
| SOURCE | Homo sapiens (human) |
| 1 | cgcgacctca gatcagacgt ggcgacccgc tgaatttaag catattagtc agcggaggag |
| 61 | aagaaactaa ccaggattcc ctcagtaacg gcgagtgaac agggaagagc ccagcgccga |
| 121 | atccccaccc cgcagcgggg cgcgggacat gtggcatacg gaagacccgc tacccggcac |
| 181 | cgctcgtggg gggcccaagt ccttctgatc gaggcccagc ccatggacgg tgtgaggccg |
| 241 | gtagcagccc ccagcgcgcc gggcccgggt cttcccggag tcgggttgct tgggaatgca |
| 301 | gcccaaagcg ggtggLaaac tccatctaag gctaaatacc ggcacgagac cgatagtcaa |
| 361 | caagtaccgt aagggaaagt tgaaaagaac tttgaagaga gagttcaaga gggcgtgaaa |
| 421 | ccattaagag gtaaacgagt ggggtccgcg cagtccgccc ggaggattca acccagcggc |
| 481 | ggatccggcc gtgtcggcgg cccgacggat ctttcccgcc ccccgttcct cccgacccct |
| 541 | ccacccgccc tcccttcccc cgccgcccct cctcctcctc cccggagggg gcgggctccg |
| 601 | gcgggtgcgg gggtgggcgg gcggggccgg gggtggggtc ggcgggggac cgtcccccga |
| 661 | ccggcgaccg gccgccgccg ggcgcatttc caccgcggcg gtgcgccgcg accggctccg |
| 721 | ggacggctgg gaaagcccgg cggggaagat ggctcagggg gccccgtccg tccgtccgtc |
| 781 | cgtcctcctc ctcccccgtc tccgcccccc ggccccgcgt cctccctcgg gagggcgcgc |
| 841 | gggtcggggc ggcggcggcg gcggcggtgg cggcggcggc ggcggcggcg ggaccgaaac |
| 901 | cccccccgag tgttacagcc cccccggcag cagcactcgc cgaatcccgg ggccgaggga |
| 961 | gcgagacccg tcgccgcgct ctcccccctc ccggcgccca cccccgcggg gaatcccccg |
| 1021 | cgaggggggt ctcccccacg ggggcgcgcc gacgtctcct cgtgggaggg ccggaccacc |
| 1081 | cctcccacgg cgcgaccact ctcccacccc tcctccccgc gcccccaccc cggcaacggg |
| 1141 | gggggtgccg cgcgcgagtc gggaagcggg gcggactgtc cccagtgcgc cccgggcggg |
| 1201 | tcgcgccgtc gggcccgggg gaggttctct cggggccacg cgcgcgtccc ccgaagaggg |
| 1261 | ggacggcgga gcgagcgcac ggggtcggcg gcgacgtcgg ctacccaccc gacccgtctt |
| 1321 | gaaacacgga ccaaggagtc taacacgtac gcgagtcggg ggctcgcacg aaagccgccg |
| 1381 | tggcgcaatg aagatgaagg ccggcgcgct cgccgaccga ggtgggatcc cgaggcctct |
| 1441 | ccagtccgcc gagggcgcac caccggcccg tctcacccgc cgcgccgggg aggtggagca |
| 1501 | cgagcgcacg tgttaggacc cgaaagatgg tgaactatgc ctgggcaggg cgaagccaga |
| 1561 | ggaaactctg gtggaggtcc gtagcggtcc tgacgtgcaa atcggtcgtc cgacctgggt |
| 1621 | ataggggcga aagactaatc gaaccatcta gtagctggtt ccctccaaag tttccctcag |
| 1681 | gatagctggc gctctcgcag acccaacgca cccccgccac gcagttttat ccggtaaagc |
| 1741 | gaatgattag aggtcttggg gccgaaacga tctcaaccta ttctcaaact ttaaatgggt |
| 1801 | aagaagcccg gctcgctggc gtggagccgg gcgtggaatg cgagtgccta gtgggccact |
| 1861 | tttggtaagc agaactggcg ctgcgggatg aaccgaacgc cgggttaagg cgcccgatgc |
| 1921 | cgacgctcat cagaccccag aaaaggtgtt ggttgatata gacagcagga cggtggccat |
| 1981 | ggaagtcgga atccgctaag gagtgtgtaa caactcacct gccgaatcaa ctagccctga |
| 2041 | aaatggatgg cgctggagcg tcgggcccat acccggccgt caccggcagt cgagagtgga |
| 2101 | cgggagcggc gggggcggcg cgcgcgcgcg cgcgtgtggt gtgcgtcgga gggcggcggc |
| 2161 | ggcggcggcg gcgggggtgt ggggtccttc ccccgccccc ccccccacgc ctcctcccct |
| 2221 | cctcccgccc acgccccact ccccaccccc gaagccccgc ggacgctacg ccgcaacgag |
| 2281 | taagagggcc gctgcggtga gccttgaagc ctagggcgca ggcccgagtg gagccgccgc |
| 2341 | aggtgcagat cttggtggta gtagcaaata ttcaaacgag aactttgaag gccgaagtgg |
| 2401 | agaagggttc catgtgaaca gcagttgaac atgggtcagt cggtcctgag agatgggcga |
| 2461 | gcgccgttcc gaagggacgg gcgatggcct ccgttgccct cggccgatcg aaagggagtc |
| 2521 | gggttcagat ccccgaatcc ggagtggcgg agatgagcgc cgcgaggcgt ccagtgcgat |
| 2581 | aacgcgaccg atcccggaga agccggcgag agccccgggg agagttctct tttctttgtg |
| 2641 | aagggcaggg cgccctggaa tgggttcgcc ccgagagagg ggcccgtgcc ttggaaagcg |
| 2701 | tcgcggttcc ggcggcatcc ggtaagctct cgctggccct tgaaaatccg ggggagaggg |
| 2761 | tgtaaatctc gcgccgggcc gtacccatat ccgcagcagg tctccdaggt gaacagcctc |
| 2821 | tggcatgttg gaacaatgta ggtaagggaa gtcggcaagc cggatccgta acttcgggat |
| 2881 | aaggattggc tctaagggct gggtcggtcg ggctggggcg cgaagcgggg ctgggcgcgc |
| 2941 | gccgcaactg gacgaggcgc cgccgccccc cccacgcccg gggcaccccc ctcgcggccc |
| 3001 | tcccccgccc caccccgcgc gcgccgctcg ctccctcccc gccccgcgcc ctctctctct |
| 3061 | ctctctcccc cgctccccgt cctcccccct ccccgaggga gcgccgcgtg ggggcggcgg |
| 3121 | cggggggaga agggtcgggg cggcaggggc cggcggcggc ccgccgcggg gccccggcgg |
| 3181 | cgggggcacg gtcccccgcg aggggggccc gggcacccgg ggggccggcg gcggcggcga |
| 3241 | ctctggacgc gagccgggcc cttcccgtgg atcgccccag ctgcggcggg cgtcgcggcc |
| 3301 | gcccccgggg agcccggcgg gcgccggcgc gccccccccc ccaccccacg tctcgtcgcg |
| 3361 | cgcgcgtccg ctgggggcgg ggagcggtcg ggcggcggcg gtcggcgggc ggcggggcgg |
| 3421 | ggcggttcgt ccccccgccc tacccccccg gccccgtctg ccccccgttc ccccctcctc |
| 3481 | ctcggcacgc ggcagcggcg acggcaggcg gcggaagggc cgcgggccgg tcccccccac |
| 3541 | cgggtccgcc cccagggccg cggttccgcg cggcgcctcg cctcggccgg cgcctagcag |
| 3601 | ccgacttaga actagtgcgg accaggggaa tccgactgtt taattaaaac aaagcatcgc |
| 3661 | gaaggcccgc ggcgggtgtt gacgcgatgt gatttctgcc cagtgctctg aatgtcaaag |
| 3721 | tgaagaaatt caatgaagcg cgggtaaacg gcgggagtaa ctatgactct cttaaggtag |
| 3781 | ccaaatgcct cgtcatctaa ttagtgacgc gcatgaatga atgaacaaga ttcccaetgt |
| 3841 | ccctacctac tatccagcga aaccacagcc aagggaacgg gcttgacgga atcaacgggg |
| 3901 | aaagaagacc ctgttgagct tgactctagt ctggcacggt gaagagacat gagaggtgta |
| 3961 | gaataagtgg gaggcccccg gcgccccccc ggtgtcccca cgaggggccc ggggcggggt |
| 4021 | ccgccggccc tgcgggccgc cggtgaaata ccactactct gatcgttttt tcactgaccc |
| 4081 | ggtgagacgg gggagcgagc cccgagggac tctcgcttct ggcgccaagc acccggccac |
| 4141 | gcgccggccg ggcacgaccc actccgggga cagtgccagg tggggagttt gactggggcg |
| 4201 | gtacacctgt caaacggtaa cgcaggtgtc ctaaggcgag ctcagggagg acagaaacct |
| 4261 | cccgtggagc agaagggcaa aagctcgctt gatcttgatt ttcagtacga atacagaccg |
| 4321 | tgaaagcggg gcctcacgat ccttctgacc ttttgggttt taagcaggag gtgtcagaaa |
| 4381 | agttaccaca gggataactg gcttatggcg gccaagcgtt catagcaacg tcgctttttg |
| 4441 | atccttcgat gtcggctctt cctatcattg tgaagcagaa ttcaccaagc gttggattgt |
| 4501 | tcacccacta atagggaacg tgagctgggt ttagaccgtc gtgagacagg ttagttttac |
| 4561 | cctactgatg atgtgttatt gccatggtaa tcctgctcag tacgagagga accgcaggtt |
| 4621 | cagacatttg gtgtatgtgc ttggctgagg agccaatggg gcgaagctac catctgtggg |
| 4681 | attatgactg aacacctcta agtcagaatc ccgcccaggc ggaacgatac agcagcgccg |
| 4741 | cggagcctcg gttggcctcg gatagccggt cccccgcctg tccccgccgg cgggccgccc |
| 4801 | cccccctcca cgcgccccgc gcgcgcggga gggcgcgtgc cccgccgcgc gccgggaccg |
| 4861 | gggtccagtg cggagtgccc ttcgtcctgg gaaacggggc gcggccggag aggcggccgc |
| 4921 | cccctcgccc gtcacgcacc gcacgttcgt ggggaacctg gcgctaaacc attcgtagac |
| 4981 | gacctgcttc tgggtcgagg tttcatacgt aacagagcaa ctccctcgct gcgatctatt |
| 5041 | gaaagtcagc cctcgacaca agggtttgtc |

Homo sapiens RNA, 18S ribosomal 5 (RNA18S5), ribosomal RNA (SEQ ID NO: 12)
NCBI Refernce Sequence: NP_003286.2

| | |
|---|---|
| LOCUS | NR_003286 1869 bp rRNA linear PRI 16-JUL-2013 |
| DEFINITION | Homo sapiens RNA, 18S ribosomal 5 (RNA18S5), ribosomal RNA. |
| ACCESSION | NR_003286 |
| VERSION | NR_003286.2 GI: 225637497 |
| KEYWORDS | RefSeq. |
| SOURCE | Homo sapiens (human) |
| 1 | tacctggttg atcctgccag tagcatatgc ttgtctcaaa gattaagcca tgcatgtctg |
| 61 | agtacgcacg gccggtacag tgaaactgcg aatggctcat taaatcagtt atggttcctt |
| 121 | tggtcgctcg ctcctctcct acttggataa ctgtggtaat tctagagcta atacatgccg |
| 181 | acgggcactg acccccttcg cgggggggat gcgtgcattt atcagatcaa aaccaacccg |
| 241 | gtcagcccct ctccggcccc ggccgggggg cgggcgccgg cggctttggt gactctagat |
| 301 | aacctcgggc cgatcgcacg ccccccgtgg cggcgacgac ccattcgaac gtctgcccta |
| 361 | tcaactttcg atggtagtcg ccgtgcctac catggtgacc acgggtgacg gggaatcaag |
| 421 | gttcgattcc ggagagggag cctgagaaac ggctaccaca tccaaggaag gcagcaggcg |
| 481 | cgcaaattac ccactcccga cccggggagg tagtgacgcc aaataacaat acaggactct |
| 541 | ttcgaggccc tgtaattgga atgagtccac tttaaatcct ttaacgagga tccattggag |
| 601 | ggcaagtctg gtgccagcag ccgcggtaat tccagctcca atagcgtata ttaaagttac |
| 661 | tgcagttaaa aagctcgtag ttggatcttg ggagcaggcg gacggtccgc cgcgaggcga |
| 721 | gccaccgccc gtccccgccc cttgcctctc ggcgccccct cgatgctctt agctgagtgt |
| 781 | cccgcggggc ccgaagcgtt tactttgaca aaattagagt gttcaaagca ggcccgagcc |
| 841 | gcctggatac cgcagctagg aataatggaa taggaccgcg gttctatttt gttggttttc |
| 901 | ggaactgagg ccatgattaa gaggaacggc caggggcatt cgtattacgc cgctagaggt |
| 961 | gaaattcttg gaccggcgca agacggacca gagcgaaagc atttgccaag aatgttttca |
| 1021 | ttaatcaaga acgaaagtcg gaggttcgaa gacgatcaga taccgtcgta gttccgacca |
| 1081 | taaacgatgc cgaccggcga tgcggcggcg ttattcccat gacccgccgg gcagcttccg |
| 1141 | ggaaaccaaa gtctttgggt tccgggggga gtatggttgc aaagctgaaa cttaaaggaa |
| 1201 | ttgacggaag ggcaccacca agagtggaac ctgcgactta atttgactca acacgggaaa |
| 1261 | cctcacccgg cccggacacg gacaggattg acagattgat agctctttct cgattccgtg |
| 1321 | ggtggtggtg catggccgtt cttagttggt ggagcgattt gtctggttaa ttccgataac |
| 1381 | gaacgagact ctggcatgct aactagttac gcgacccccg agcggtcggc gtccccccac |
| 1441 | ttcttagagg gacaagtggc gttcagccac ccgagattga gcaataacag gtctgtgatg |
| 1501 | cccttagatg tccggggctg cacgcgcgct acactgacta gctcagcgtg tgcctaccct |
| 1561 | acgccggcag gcgcgggtaa cccgttgaac cccattcgtg atggggatcg gggattgcaa |
| 1621 | ttattcccca tgaacgagga attcccagta agtgcgggtc ataagcttgc gttgattaag |
| 1681 | tccctgccct ttgtacacac cgcccgtcgc tactaccgat tggatggttt agtgaggccc |
| 1741 | tcggatcggc cccgccgggg tcggcccacg gccctggcgg agcgctgaga agacggtcga |
| 1801 | acttgactat ctaaaggaag taaaagtcat aacaaagttt ccgtaggtga acctgcggaa |
| 1861 | ggatcatta |

Homo sapiens RNA, 5S ribosomal RNA (SEQ ID NO: 13)
>gi|189571632|ref|NR_023379.1| Homo sapiens RNA, 5S ribosomal 17 (RNA5S17),
ribosomal RNA
GTCTACGGCCATACCACCCTGAACGCGCCCGATCTCGTCTGATCTCGGAAGCTAAGCAGGGTCGGGCCTG
GTTAGTACTTGGATGGGAGACCGCCTGGGAATACCGGGTGCTGTAGGCTTT
Homo sapiens RNA, 5.8S ribosomal RNA (SEQ ID NO: 14)

| | |
|---|---|
| LOCUS | NR_003285 156 bp rRNA linear PRI 16-JUL-2013 |
| DEFINITION | Homo sapiens DNA, 5.8S ribosomal 5 (RNA5-8S5), ribosomal RNA. |
| ACCESSION | NR_003285 |
| VERSION | NR_003285.2 GI: 142372596 |
| KEYWORDS | RefSeq. |
| SOURCE | Homo sapiens (human) |
| 1 | gactcttagc ggtggatcac tcggctcgtg cgtcgatgaa gaacgcagct agctgcgaga |
| 61 | attaatgtga attgcdggac acattgatca tcgacacttc gaacgcactt gcggccccgg |
| 121 | gttcctcccg gggctacgcc tgtctgagcg tcgctt |
| LOCUS | KF899911 16572 bp DNA circular PRI 08-DEC-2013 |
| DEFINITION | Homo sapiens haplogroup Ilala mitochondrion, complete genome. |
| ACCESSION | KF899911 |
| VERSION | KF899911.1 GI: 562889938 |
| SOURCE | mitochondrion Homo sapiens (human) |

Human Mitchondrial 163 rRNA (SEQ ID NO: 15)

| | |
|---|---|
| | gctaaa |
| 1681 | cctagcccca aacccactcc accttactac cagacaacct taaccaaacc atttacccaa |
| 1741 | ataaagtata ggcgatagaa attgaaacct ggcgcaatag atatagtacc gcaagggaaa |
| 1801 | gatgaaaaat tataaccaag cataatatag caaggactaa cccctatacc ttctgcataa |
| 1861 | tgaattaact agaaataact ttgcaaggag agccaaagct aagacccccg aaaccagacg |
| 1921 | agctacctaa gaacagctaa aagagcacac ccgtctatgt agcaaaatag tgggaagatt |
| 1981 | tataggtaga ggcgacaaac ctaccgagcc tggtgatagc tggttgtcca agatagaatc |
| 2041 | ttagttcaac tttaaatttg cccacagaac cctctaaatc cccttgtaaa tttaactgtt |
| 2101 | agtccaaaga ggaacagctc tttggacact aggaaaaaac cttgtagaga gagtaaaaaa |
| 2161 | tttaacaccc atagtaggcc taaaagcagc caccaattaa gaaagcgttc aagctcaaca |
| 2221 | cccactacct aaaaaatccc aaacatataa ctgaactcct cacacccaat tggaccaatc |
| 2281 | tatcacccta tagaagaact aatgttagta taagtaacat gaaaacattc tcctccgcat |
| 2341 | aagcctgcgt cagattaaaa cactgaactg acaattaaca gcccaatatc tacaatcaac |
| 2401 | caacaagtca ttattaccct cactgtcaac ccaacacaga catgctcata aggaaaggtt |
| 2461 | aaaaaaagta aaaggaactc ggcaaatctt accccgcctg tttaccaaaa acatcacctc |
| 2521 | tagcatcacc agtattagag gcaccgcctg cccagtgaca catgtttaac ggccgcggta |
| 2581 | ccctaaccgt gcaaaggtag cataatcact tgttccttaa atagggacct gtatgaatgg |
| 2641 | ctccacgagg gttcagctgt ctcttacttt taaccagtga aattgacctg cccgtgaaga |
| 2701 | ggcgggcatg acacagcaag acgagaagac cctatagagc tttaatttat taatgcaaac |
| 2761 | agtacctaac aaacccacag gtcctaaact accaaacctg cattaaaaat ttcggttggg |
| 2821 | gcgacctcgg agcagaaccc aacctccgag cagtacatgc taagacttca ccagtcaaag |
| 2881 | cgaactacta tactcaattg atccaataac ttgaccaacg gaacaagtta ccctagggat |
| 2941 | aacagcgcaa tcctattcta gagtccatat caacaatagg gtttacgacc tcgatgttgg |
| 3001 | atcaggacat cccgatgatg cagccgctat taaaggttcg tttgttcaac gattaaagtc |
| 3061 | ctacgtgatc tgagttcaga ccggagtaat ccaggttggt ttctatctac ttcaaattcc |
| 3121 | tccctgtacg aaaggacaag agaaataagg cctacttcac aaagcgcctt cccccgtaaa |
| 3181 | tgatatcatc tcaacttagt attataccca cacccaccca agaacagggt tt |

Human Mitchondrial 12S rRNA (SEQ ID NO: 16)

| | |
|---|---|
| | a ataggtttgg |
| 661 | tcctagcctt tctattagct ttcagtaaga ttacacatgc aagcatcccc gttccagtga |
| 721 | gttcaccctc taaatcacca cgatcaaaag ggacaagcat caagcacgca gcaatgcagc |
| 781 | tcaaaacgct tagcctagcc acacccccac gagaaacagc agtgattaac ctttagcaat |
| 841 | aaacgaaagt ttaactaagc tatactaacc ccagggttgg tcaatttcgt gccagccacc |
| 901 | gcggtcacac gattaaccca agtcaataga agccggcgta aagagtgttt tagatcaccc |
| 961 | cctccccaat aaagctaaaa ctcacctgag ttgtaaaaaa ctccagttga cacaaaatag |
| 1021 | actacgaaag tggctttaac atatctgaac acacaatagc taagacccaa actgggatta |
| 1081 | gataccccac tatgcttagc cctaaacctc aacagttaaa tcaacaaaac tgctcgccag |
| 1141 | aacactacga gccacagctt aaaactcaaa ggacctggcg gtgcttcata tccctctaga |
| 1201 | ggagcctgtt ctgtaatcga taaaccccga tcaacctcac cacctcttgc tcagcctata |
| 1261 | taccgccatc ttcagcaaac cctgatgaag gctacaaagt aagcgcaagt acccacgtaa |
| 1321 | agacgttagg tcaaggtgta gcccatgagg tggcaagaaa tgggctacat tttctacccc |
| 1381 | agaaaactac gatagccctt atgaaactta aaggtcgaaa gtggatttag cagtaaactg |
| 1441 | agagtagagt gcttagttga acagggccct gaagcgcgta cacaccgccc gtcaccctcc |
| 1501 | tcaagtatac ttcaaaggac atttaactaa aacccctacg catttatata gaggagacaa |
| 1561 | gtcgtaacat ggtaagtgta ctggaaagtg cacttggacg aa |

APPENDIX 2
120-mer DNA rRNA Capture Probes/
Baits at 1x coverage (Note: /5Biosg/ = 5′-biotin)

| Name | | |
|---|---|---|
| (SEQ ID NO:_) | Sequence | GC content |
| KF899911.1_12SrRNA_r1_1 | /5Biosg/GCGTGCTTGATGCTTGTCCCTTTTGATCGTGGTGATTTAGAGG | 0.45 |
| (SEQ ID NO: 17) | GTGAACTCACTGGAACGGGGATGCTTGCATGTGTAATCTTACTAAGAGCTA | |
| | ATAGAAAGGCTAGGACCAAACCTATT | |
| KF899911.1_12SrRNA_r1_2 | /5Biosg/GAAATTGACCAACCCTGGGGTTAGTATAGCTTAGTTAAACTTT | 0.45 |
| (SEQ ID NO: 18) | CGTTTATTGCTAAAGGTTAATCACTGCTGTTTCCCGTGGGGGTGTGGCTAG | |
| | GCTAAGCGTTTTGAGCTGCATTGCTG | |
| KF899911.1_12SrRNA_r1_3 | /5Biosg/ACTGGAGTTTTTTACTACTCAGGTGAGTTTTAGCTTTATTGGG | 0.483333333 |
| (SEQ ID NO: 19) | GAGGGGGTGATCTAAAACACTCTTTACGCCGGCTTCTATTGACTTGGGTTA | |
| | ATCGTGTGACCGCGGTGGCTGGCACG | |
| KF899911.1_12SrRNA_r1_4 | /5Biosg/TGTTGATTTAACTGTTGAGGTTTAGGGCTAAGCATAGTGGGGT | 0.383333333 |
| (SEQ ID NO: 20) | ATCTAATCCCAGTTTGGGTCTTAGCTATTGTGTGTTCAGATATGTTAAAGC | |
| | CACTTTCGTAGTCTATTTTGTGTCAA | |
| KF899911.1_12SrRNA_r1_5 | /5Biosg/GAGGTGGTGAGGTTGATCGGGGTTTATCGATTACAGAACAGGC | 0.508333333 |
| (SEQ ID NO: 21) | TCCTCTAGAGGGATATGAAGCACCGCCAGGTCCTTTGAGTTTTAAGCTGTG | |
| | GCTCGTAGTGTTCTGGCGAGCAGTTT | |
| KF899911.1_12SrRNA_r1_6 | /5Biosg/GCCCATTTCTTGCCACCTCATGGGCTACACCTTGACCTAACGT | 0.5 |
| (SEQ ID NO: 22) | CTTTACGTGGGTACTTGCGCTTACTTTGTAGCCTTCATCAGGGTTTGCTGA | |
| | AGATGGCGGTATATAGGCTGAGCAAG | |
| KF899911.1_12SrRNA_r1_7 | /5Biosg/TGTGTACGCGCTTCAGGGCCCTGTTCAACTAAGCACTCTACTC | 0.45 |
| (SEQ ID NO: 23) | TCAGTTTACTGCTAAATCCACCTTCGACCCTTAAGTTTCATAAGGGCTATC | |
| | GTAGTTTTCTGGGGTAGAAAATGTAG | |
| KF899911.1_12SrRNA_r1_8 | /5Biosg/GTTCGTCCAAGTGCACTTTCCAGTACACTTACCATGTTACGAC | 0.441666667 |
| (SEQ ID NO: 24) | TTGTCTCCTCTATATAAATGCGTAGGGGTTTTAGTTAAATGTCCTTTGAAG | |
| | TATACTTGAGGAGGGTGACGGGCGGT | |
| KF899911.1_16SrRNA_r1_1 | /5Biosg/TTGCGGTACTATATCTATTGCGCCAGGTTTCAATTTCTATCGC | 0.425 |
| (SEQ ID NO: 25) | CTATACTTTATTTGGGTAAATGGTTTGGTTAAGGTTGTCTGGTAGTAAGGT | |
| | GGAGTGGGTTTGGGGCTAGGTTTAGC | |
| KF899911.1_16SrRNA_r1_2 | /5Biosg/GTTTCGGGGGTCTTAGCTTTGGCTCTCCTTGCAAAGTTATTTC | 0.375 |
| (SEQ ID NO: 26) | TAGTTAATTCATTATGCAGAAGGTATAGGGGTTAGTCCTTGCTATATTATG | |
| | CTTGGTTATAATTTTTCATCTTTCCC | |
| KF899911.1_16SrRNA_r1_3 | /5Biosg/ATCTTGGACAACCAGCTATCACCAGGCTCGGTAGGTTTGTCGC | 0.466666667 |
| (SEQ ID NO: 27) | CTCTACCTATATATCTTCCCACTATTTTGCTACATAGACGGGTGTGCTCTT | |
| | TTAGCTGTTCTTAGGTAGCTCGTCTG | |
| KF899911.1_16SrRNA_r1_4 | /5Biosg/CTCTCTCTACAAGGTTTTTTCCTAGTGTCCAAAGAGCTGTTCC | 0.375 |
| (SEQ ID NO: 28) | TCTTTGGACTAACAGTTAAATTTACAAGGGGATTTAGAGGGTTCTGTGGGC | |
| | AAATTTAAAGTTGAACTAAGATTCTA | |
| KF899911.1_16SrRNA_r1_5 | /5Biosg/CCAATTGGGTGTGAGGAGTTCAGTTATATGTTTGGGATTTTTT | 0.391666667 |
| (SEQ ID NO: 29) | AGGTAGTGGGTGTTGAGCTTGAACGCTTTCTTAATTGGTGGCTGCTTTTAG | |
| | GCCTACTATGGGTGTTAAATTTTTTA | |
| KF899911.1_16SrRNA_r1_6 | /5Biosg/GTAGATATTGGGCTGTTAATTGTCAGTTCAGTGTTTTAATCTG | 0.366666667 |
| (SEQ ID NO: 30) | ACGCAGGCTTATGCGGAGGAGTATGTTTTCATGTTACTTATACTAACATTA | |
| | GTTCTTCTATAGGGTGATAGATTGGT | |
| KF899911.1_16SrRNA_r1_7 | /5Biosg/TGTTTTTGGTAAACAGGCGGGGTAAGATTTGCCGAGTTCCTTT | 0.4 |
| (SEQ ID NO: 31) | TACTTTTTTTAACCTTTCCTTATGAGCATGCCTGTGTTGGGTTGACAGTGA | |
| | GGGTAATAATGACTTGTTGGTTGATT | |
| KF899911.1_16SrRNA_r1_8 | /5Biosg/TACAGGTCCCTATTTAAGGAACAAGTGATTATGCTACCTTTGC | 0.5 |
| (SEQ ID NO: 32) | ACGGTTAGGGTACCGCGGCCGTTAAACATGTGTCACTGGGCAGGCGGTGCC | |
| | TCTAATACTGGTGATGCTAGAGGTGA | |
| KF899911.1_16SrRNA_r1_9 | /5Biosg/TTAATAAATTAAAGCTCCATAGGGTCTTCTCGTCTTGCTGTGT | 0.466666667 |
| (SEQ ID NO: 33) | CATGCCCGCCTCTTCACGGGCAGGTCAATTTCACTGGTTAAAAGTAAGAGA | |
| | CAGCTGAACCCTCGTGGAGCCATTCA | |
| KF899911.1_16SrRNA_r1_10 | /5Biosg/TGGTGAAGTCTTAGCATGTACTGCTCGGAGGTTGGGTTCTGCT | 0.483333333 |
| (SEQ ID NO: 34) | CCGAGGTCGCCCCAACCGAAATTTTTAATGCAGGTTTGGTAGTTTAGGACC | |
| | TGTGGGTTTGTTAGGTACTGTTTGCA | |
| KF899911.1_16SrRNA_r1_11 | /5Biosg/GAGGTCGTAAACCCTATTG7TGATATGGACTCTAGAATAGGAT | 0.408333333 |
| (SEQ ID NO: 35) | TGCGCTGTTATCCCTAGGGTAACTTGTTCCGTTGGTCAAGTTATTGGATCA | |
| | ATTGAGTATAGTAGTTCGCTTTGACT | |
| KF899911.1_16SrRNA_r1_12 | /5Biosg/AAGTAGATAGAAACCGACCTGGATTACTCCGGTCTGAACTCAG | 0.458333333 |
| (SEQ ID NO: 36) | ATCACGTAGGACTTTAATCGTTGAACAAACGAACCTTTAATAGCGGCTGCA | |
| | CCATCGGGATGTCCTGATCCAACATC | |
| KF899911.1_16SrRNA_r1_13 | /5Biosg/AAACCCTGTTCTTGGGTGGGTGTGGGTATAATACTAAGTTGAG | 0.441666667 |
| (SEQ ID NO: 37) | ATGATATCATTTACGGGGGAAGGCGCTTTGTGAAGTAGGCCTTATTTCTCT | |
| | TGTCCTTTCGTACAGGGAGGAATTTG | |
| NR_003286.2_RNA18S5_r1_1 | /5Biosg/AAGGAACCATAACTGATTTAATGAGCCATTCGCAGTTTCACTG | 0.458333333 |
| (SEQ ID NO: 38) | TACCGGCCGTGCGTACTCAGACATGCATGGCTTAATCTTTGAGACAAGCAT | |
| | ATGCTACTGGCAGGATCAACCAGGTA | |
| NR_003286.2_RNA18S5_r1_2 | /5Biosg/GTTGGTTTTGATCTGATAAATGCACGCATCCCCCCCGCGAAGG | 0.533333333 |
| (SEQ ID NO: 38) | GGGTCAGCGCCCGTCGGCATGTATTAGCTCTAGAATTACCACAGTTATCCA | |
| | AGTAGGAGAGGAGCGAGCGACCAAAG | |
| NR_003286.2_RNA18S5_r1_3 | /5Biosg/GACGTTCGAATGGGTCGTCGCCGCCACGGGGGGCGTGCGATCG | 0.741666667 |
| (SEQ ID NO: 39) | GCCCGAGGTTATCTAGAGTCACCAAAGCCGCCGGCGCCCGCCCCCCGGCCG | |
| | GGGCCGGAGAGGGGCTGACCGGGTTG | |
| NR_003286.2_RNA18S5_r1_4 | /5Biosg/CTTCCTTGGATGTGGTAGCCGTTTCTCAGGCTCCCTCTCCGGA | 0.575 |
| (SEQ ID NO: 40) | ATCGAACCCTGATTCCCCGTCACCCGTGGTCACCATGGTAGGCACGGCGAC | |
| | TACCATCGAAAGTTGATAGGGCAGAC | |
| NR_003286.2_RNA18S5_r1_5 | /5Biosg/CGTTAAAGGATTTRAAGTGGACTCATTCCRATTACAGGGCCTC | 0.491666667 |
| (SEQ ID NO: 41) | GARAGAGTCCTGTATTGTTATTTTTCGTCACTACCTCCCCGGGTCGGGAGT | |
| | GGGTAATTTGCGCGCCTGCTGCCTTC | |
| NR_003286.2_RNA18S5_r1_6 | /5Biosg/GCCCGCCCGCTCCCAAGATCCLACTACGAGCTTTTTAACTGCA | 0.533333333 |
| (SEQ ID NO: 42) | GCAACTTTAATATACGCTATTGGAGCTGGAATTACCGCGGCTGCTGGCACC | |
| | AGACTTGCCCTCCAATGGATCCTCGT | |
| NR_003286.2_RNA18S5_r1_7 | /5Biosg/ACTCTRATTTTTTCAAAGTAAACGCTTCGGGCCCCGCGGGACA | 0.666666667 |
| (SEQ ID NO: 43) | CTCAGCTAAGAGCATCGAGGGGGCGCCGAGAGGCAAGGGGCGGGGACGGGC | |
| | GGTGGCTCGCCTCGCGGCGGACCGCC | |
| NR_003286.2_RNA18S5_r1_8 | /5Biosg/CCCCCGGCCGTCCCTCTTAATCATGGCCTCAGTTCCGAAAACC | 0.55 |
| (SEQ ID NO: 44) | AACAAAATAGAACCGCGGTCCTATTCCATTATTCCTAGCTGCGGTATCCAG | |
| | GCGGCTCGGGCCTGCTTTGAACACTC | |
| NR_003286.2_RNA18S5_r1_9 | /5Biosg/GTCTTCGAACCTCCGACTTTCGTTCTTGATTAATGAAAACATT | 0.491666667 |
| (SEQ ID NO: 45) | CTTGGCAAATGCTTTCGCTCTGGTCCGTCTTGCGCCGGTCCAAGAATTTCA | |
| | CCTCTAGCGGCGCAATACGAATGCCC | |
| NR_003286.2_RNA18S5_r1_10 | /5Biosg/CCCCCCGGAACCCAAAGACTTTGGTTTCCCGGAAGCTGCCCGG | 0.608333333 |
| (SEQ ID NO: 46) | CGGGTCATGGGAATAACGCCGCCGCATCGCCGGTCGGCATCGTTTATGGTC | |
| | GGAACTACGACGGTATCTGATCGTCT | |
| NR_003286.2_RNA18S5_r1_11 | /5Biosg/CCTGTCCGTGTCCGGGCCGGGTGAGGTTTCCCGTGTTGAGTCA | 0.558333333 |
| (SEQ ID NO: 47) | AATTAAGCCGCAGGCTCCACTCCTGGTGGTGCCCTTCCGTCAATTCCTTTA | |
| | AGTTTCAGCTTTGCAACCATACTCCC | |
| NR_003286.2_RNA18S5_r1_12 | /5Biosg/GTTAGCATGCCAGAGTCTCGTTCGTTATCGGAATTAACCAGAC | 0.483333333 |
| (SEQ ID NO: 48) | AAATCGCTCCACCAACTAAGAACGGCCATGCACCACCACCCACGGAATCGA | |
| | GAAAGAGCTATCAATCTGTCAATCCT | |
| NR_003286.2_RNA18S5_r1_13 | /5Biosg/AGCCCCGGACATCTAAGGGCATCACAGACCTGTTATTGCTCAA | 0.575 |
| (SEQ ID NO: 49) | TCTCGGGTGGCTGAACGCCACTTGTCCCTCTAAGAAGTTGGGGGACGCCGA | |
| | CCGCTCGGGGGTCGCGTAACTAGTTA | |
| NR_003286.2_RNA18S5_r1_14 | /5Biosg/CGTTCATGGGGAATAATTGCAATCCCCGATCCCCATCACGAAT | 0.616666667 |
| (SEQ ID NO: 50) | GGGGTTCAACGGGTTACCCGCGCCTGCCGGCGTAGGGTAGGCACACGCTGA | |
| | GCCAGTCAGTGTAGCGCGCGTGCAGC | |
| NR_003286.2_RNA18S5_r1_15 | /5Biosg/GGGCCGATCCGAGGGCCTCACTAAACCATCCAATCGGTAGTAG | 0.55 |
| (SEQ ID NO: 51) | CGACGGGCGGTGTGTACAAAGGGCAGGGACTTAATCAACGCAAGCTTATGA | |
| | CCCGCACTTACTGGGAATTCCTCGTT | |
| NR_003286.2_RNA18S5_r1_16 | /5Biosg/TAATGATCCTTCCGCAGGTTCACCTACGGTAACCTTGTTACGA | 0.575 |
| (SEQ ID NO: 52) | CTTTTACTTCCTCTAGATAGTCAAGTTCGACCGTCTTCTCAGCGCTCCGCC | |
| | AGGGCCGTGGGCCGACCCCGGCGGGG | |
| NR_003287.2_RNA28S5_r1.1_1 | /5Biosg/TCGGCGCTGGGCTCTTCCCTGTTCACTCGCCGTTACTGAGGGA | 0.55 |
| (SEQ ID NO: 53) | ATCCTGGTTAGTTTCTTCTCCTCCGCTGACTAATATGCTTAAATTCAGCGG | |
| | GTCGCCACGTCTGATCTGAGGTCGCG | |
| NR_003287.2_RNA28S5_r1.1_2 | /5Biosg/TCCACGGGCTGGGCCTCGATCAGAAGGACTTGGGCCCCCCACG | 0.758333333 |
| (SEQ ID NO: 54) | AGCGGCGCCGGGGAGCGGGTCTTCCGTACGCCACATGTCCCGCGCCCCGCC | |
| | GCGGGGCGGGGATTCGGCGCTGGGCT | |
| NR_003287.2_RNA28S5_r1.1_3 | /5Biosg/TAGCCTTAGATGGAGTTTACCACCCGCTTTGGGCTGCATTCCC | 0.691666667 |
| (SEQ ID NO: 55) | AAGCAACCCGACTCCGGGAAGACCCGGGCCCGGCGCGCCGGGGGCCGCTAC | |
| | CGGCCTCACACCGTCCACGGGCTGGG | |
| NR_003287.2_RNA28S5_r1.1_4 | /5Biosg/CACCCGTTTACCTCTTAACGGTTTCACGCCCTCTTGAACTCTC | 0.458333333 |
| (SEQ ID NO: 56) | TCTTCAAAGTTCTTTTCAACTTTCCCTTACGGTACTTGTTGACTATCGGTC | |
| | TCGTGCCGGTATTTAGCCTTAGATGG | |
| NR_003287.2_RNA28S5_r1.1_5 | /5Biosg/CGGGTGGAGGGGTCGGGAGGAACGGGGGGCGGGAAAGATCCGC | 0.758333333 |
| (SEQ ID NO: 57) | CGGGCCGCCGACACGGCCGGACCCGCCGCCGGGTTGAATCCTCCGGGCGGA | |
| | CTGCGCGGACCCCACCCGTTTACCTC | |
| NR_003287.2_RNA28S5_r1.1_6 | /5Biosg/GACGGTCCCCCGCCGACCCCACCCCCGGCCCCGCCCGCCCACC | 0.85 |
| (SEQ ID NO: 58) | CCCGCACCCGCCGGAGCCCGCCCCCTCCGGGGAGGAGGAGGAGGGGCGGCG | |
| | GGGGAAGGGAGGGCGGGTGGAGGGGT | |
| NR_003287.2_RNA28S5_r1.1_7 | /5Biosg/CCCCCCGAGCCACCTTCCCCGCCGGGCCTTCCCAGCCGTCCCG | 0.833333333 |
| (SEQ ID NO: 59) | GAGCCGGTCGCGGCGCACCGCCGCGGTGGAAATGCGCCCGGCGGCGGCCGG | |
| | TCGCCGGTCGGGGGACGGTCCCCCGC | |
| NR_003287.2_RNA28S5_r1.1_8 | /5Biosg/ACCGCCGCCGCCGCCGCCGCCCCGACCCGCGCGCCCTCCCGAG | 0.85 |
| (SEQ ID NO: 60) | GGAGGACGCGGGGCCGGGGGGCGGAGACGGGGGAGGAGGAGGACGGACGGA | |
| | CGGACGGACGGGGCCCCCCGAGCCAC | |
| NR_003287.2_RNA28S5_r1.2_1 | /5Biosg/GAGGGGGGAGAGCGCGGCGACGGGTCTCGCTCCCTCGGCCCCG | 0.791666667 |
| (SEQ ID NO: 61) | GGATTCGGCGAGTGCTGCTGCCGGGGGGGCTGTAACACTCGGGGGGGGTTT | |
| | CGGTCCCGCCGCCGCCGCCGCCGCCG | |
| NR_003287.2_RNA28S5_r1.2_2 | /5Biosg/GGGGTGGGAGAGCGGTCGCGCCGTGGGAGGGGTGGCCCGGCCC | 0.85 |
| (SEQ ID NO: 62) | CCCCACGAGGAGACGCCGGCGCGCCCCCGCGGGGGAGACCCCCCTCGCGGG | |
| | GGATTCCCCGCGGGGGTGGGCGCCGG | |
| NR_003287.2_RNA28S5_r1.2_3 | /5Biosg/AGAGAACCTCCCCCGGGCCCGACGGCGCGACCCGCCCGGGGCG | 0.858333333 |
| (SEQ ID NO: 63) | CACTGGGGACAGTCCGCCCCGCCCCCCGACCCGCGCGCGGCACCCCCCCCG | |
| | TCGCCGGGGCGGGGGCGCGGGGAGGA | |
| NR_003287.2_RNA28S5_r1.2_4 | /5Biosg/GCACGTGTTAGACTCCTTGGTCCGTGTTTCAAGACGGGTCGGG | 0.725 |
| (SEQ ID NO: 64) | TGGGTAGCCGACGTCGCCGCCGACCCCGTGCGCTCGCTCCGCCGTCCCCCT | |
| | CTTCGGGGGACGCGCGCGTGGCCCCG | |
| NR_003287.2_RNA28S5_r1.2_5 | /5Biosg/CGGGCCGGTGGTGCGCCCTCGGCGGACTGGAGAGGCCTCGGGA | 0.758333333 |
| (SEQ ID NO: 65) | TCCCACCTCGGCCGGCGAGCGCGCCGGCCTTCACCTTCATTGCGCCACGGC | |
| | GGCTTTCGTGCGAGCCCCCGACTCGC | |
| NR_003287.2_RNA28S5_r1.2_6 | /5Biosg/GGACCGCTACGGACCTCCACCAGAGTTTCCTCTGGCTTCGCCC | 0.658333333 |
| (SEQ ID NO: 66) | TGCCCAGGCATAGTTCACCATCTTTCGGGTCCTAACACGTGCGCTCGTGCT | |
| | CCACCTCCCCGGCGCGGCGGGCGAGA | |
| NR_003287.2_RNA28S5_r1.2_7 | /5Biosg/TGCGTCGGGTCTGCGAGAGCGCCAGCTATCCTGAGGGAAACTT | 0.566666667 |
| (SEQ ID NO: 67) | CGGAGGGAACCAGCTACTAGATGGTTCGATTAGTCTTTCGCCCCTATACCC | |
| | AGGTCGGACGACCGATTTGCACGTCA | |
| NR_003287.2_RNA28S5_r1.2_8 | /5Biosg/CCGGCTCCACGCCAGCGAGCCGGGCTTCTTACCCATTTAAAGT | 0.541666667 |
| (SEQ ID NO: 68) | TTGAGAATAGGTTGAGATCGTTTCGGCCCCAAGACCTCTAATCATTCGCTT | |
| | TACCGGATAAAACTGCGTGGCGGGGG | |
| NR_003287.2_RNA28S5_r1.2_9 | /5Biosg/AACACCTTTTCTGGGGTCTGATGAGCGTCGGCATCGGGCGCCT | 0.6 |
| (SEQ ID NO: 69) | TAACCCGGCGTTCGGTTCATCCCGCAGCGCCAGTTCTGCTTACCAAAAGTG | |
| | GCCCACTAGGCACTCGCATTCCACGC | |
| NR_003287.2_RNA28S5_r1.2_10 | /5Biosg/ATGGGCCCGACGCTCCAGCGCCATCCATTTTCAGGGCTAGTTG | 0.55 |
| (SEQ ID NO: 70) | ATTCGGCAGGTGAGTTGTTACACACTCCTTAGCGGATTCCGACTTCCATGG | |
| | CCACCGTCCTGCTGTCTATATCAACC | |
| NR_003287.2_RNA28S5_r1.2_11 | /5Biosg/GAAGGACCCCACACCCCCGCCGCCGCCGCCGCCGCCGCCCTCC | 0.833333333 |
| (SEQ ID NO: 71) | GACGCACACCACACGCGCGCGCGCGCGCGCCGCCCCCGCCGCTCCCGTCCA | |
| | CTCTCGACTGCCGGCGACGGCCGGGT | |
| NR_003287.2_RNA28S5_r1.2_12 | /5Biosg/GCTTCAAGGCTCACCGCAGCGGCCCTCCTACTCGTCGCGGCGT | 0.808333333 |
| (SEQ ID NO: 72) | AGCGTCCGCGGGGCTCCGGGGGCGGGGAGCGGGGCGTGGGCGGGAGGAGGG | |
| | GAGGAGGCGTGGGGGGGGGGGCGGGG | |
| NR_003287.2_RNA28S5_r1.2_13 | /5Biosg/GTTCAACTGCTGTTCACATGGAACCCTTCTCCACTTCGGCCTT | 0.558333333 |
| (SEQ ID NO: 73) | CAAAGTTCTCGTTTGAATATTTGCTACTACCACCAAGATCTGCACCTGCGG | |
| | CGGCTCCACCCGGGCCCGCGCCCTAG | |
| NR_003287.2_RNA28S5_r1.2_14 | /5Biosg/CCGCCACTCCGGATTCGGGGATCTGAACCCGACTCCCTTTCGA | 0.666666667 |
| (SEQ ID NO: 74) | TCGGCCGAGGGCAACGGAGGCCATCGCCCGTCCCTTCGGAACGGCGCTCGC | |
| | CCATCTCTCAGGACCGACTGACCCAT | |
| NR_003287.2_RNA28S5_r1.2_15 | /5Biosg/GGCGAACCCATTCCAGGGCGCCCTGCCCTTCACAAAGAAAAGA | 0.675 |
| (SEQ ID NO: 75) | GAACTCTCCCCGGGGCTCCCGCCGGCTTCTCCGGGATCGGTCGCGTTACCG | |
| | CACTGGACGCCTCGCGGCGCCCATCT | |
| NR_003287.2_RNA28S5_r1.2_16 | /5Biosg/ATATGGGTACGGCCCGGCGCGAGATTTACACCCTCTCCCCCGG | 0.666666667 |
| (SEQ ID NO: 76) | ATTTTCAAGGGCCAGCGAGAGCTCACCGGACGCCGCCGGAACCGCGACGCT | |
| | TTCCAAGGCACGGGCCCCTCTCTCGG | |
| NR_003287.2_RNA28S5_r1.2_17 | /5Biosg/CGACCGACCCAGCCCTTAGAGCCAATCCTTATCCCGAAGTTAC | 0.566666667 |
| (SEQ ID NO: 77) | GGATCCGGCTTGCCGACTTCCCTTACCTACATTGTTCCAACATGCCAGAGG | |
| | CTGTTCACCTTGGAGACCTGCTGCGG | |
| NR_003287.2_RNA28S5_r1.2_18 | /5Biosg/CGAGCGGCGCGCGCGGGGTGGGGCGGGGGAGGGCCGCGAGGGG | 0.891666667 |
| (SEQ ID NO: 78) | GGTGCCCCGGGCGTGGGGGGGGCGGCGGCGCCTCGTCCAGCCGCGGCGCGC | |
| | GCCCAGCCCCGCTTCGCGCCCCAGCC | |
| NR_003287.2_RNA28S5_r1.2_19 | /5Biosg/GCCCCTGCCGCCCCGACCCTTCTCCCCCCGCCGCCGCCCCCAC | 0.825 |
| (SEQ ID NO: 79) | GCGGCGCTCCCCCGGGGAGGGGGGAGGACGGGGAGCGGGGGAGAGAGAGAG | |
| | AGAGAGGGCGCGGGGCGGGGAGGGAG | |
| NR_003287.2_RNA28S5_r1.2_20 | /5Biosg/CCACGGGAAGGGCCCGGCTCGCGTCCAGAGTCGCCGCCGCCGC | 0.9 |
| (SEQ ID NO: 80) | CGGCCCCCCGGGTGCCCGGGCCCCCCTCGCGGGGGACCGTGCCCCCGCCGC | |
| | CGGGGCCCCGCGGCGGGCCGCCGCCG | |
| NR_003287.2_RNA28S5_r1.2_21 | /5Biosg/CGACCGCTCCCCGCCCCCAGCGGACGCGCGCGCGACGAGACGT | 0.875 |
| (SEQ ID NO: 81) | GGGGTGGGGGGGGGGGCGCGCCGGCGCCCGCCGGGCTCCCCGGGGGCGGCC | |
| | GCGACGCCCGCCGCAGCTGGGGCGAT | |
| NR_003287.2_RNA28S5_r1.2_22 | /5Biosg/CGCCTGCCGCCGCCGCCGCCGCGCGCCGAGGAGGAGGGGGGAA | 0.891666667 |
| (SEQ ID NO: 52) | CGGGGGGCGGACGGGGCCGGGGGGGTAGGGCGGGGGGACGAACCGCCCCGC | |
| | CCCGCCGCCCGCCGACCGCCGCCGCC | |
| NR_003287.2_RNA28S5_r1.2_23 | /5Biosg/TTCCCCTGGTCCGCACCAGTTCTAAGTCGGCTGCTAGGCGCCG | 0.816666667 |
| (SEQ ID NO: 83) | GCCGAGGCGAGGCGCCGCGCGGAACCGCGGCCCCGGGGGCGGACCCGGCGG | |
| | GGGGGACCGGCCCGCGGCCCCTCCGC | |
| NR_003287.2_RNA28S5_r1.2_24 | /5Biosg/CGTTTACCCGCGCTTCATTGAATTTCTTCACTTTGACATTCAG | 0.491666667 |
| (SEQ ID NO: 84) | AGCACTGGGCAGAAATCACATCGCGTCAACACCCGCCGCGGGCCTTCGCGA | |
| | TGCTTTGTTTTAATTAAACAGTCGGA | |
| NR_003287.2_RNA28S5_r1.2_25 | /5Biosg/GGCTGTGGTTTCGCTGGATAGTAGGTAGGGACAGTGGGAATCT | 0.491666667 |
| (SEQ ID NO: 85) | CGTTCATCCATTCATGCGCGTCACTAATTAGATGACGAGGCATTTGGCTAC | |
| | CTTAAGAGAGTCATAGTTACTCCCGC | |
| NR_003287.2_RNA28S5_r1.2_26 | /5Biosg/GGGGGGGCGCCGGGGGCCTCCCACTTATTCTACACCTCTCATG | 0.6 |
| (SEQ ID NO: 56) | TCTCTTCACCGTGCCAGACTAGAGTCAAGCTCAACAGGGTCTTCTTTCCCC | |
| | GCTGATTCCGCCAAGCCCGTTCCCTT | |
| NR_003287.2_RNA28S5_r1.2_27 | /5Biosg/GCCCCTCGGGGCTCGCCCCCCCGCCTCACCGGGTCAGTGAAAA | 0.741666667 |
| (SEQ ID NO: 87) | AACGATCAGAGTAGTGGTATTTCACCGGCGGCCCGCAGGGCCGGCGGACCC | |
| | CGCCCCGGGCCCCTCGCGGGGACACC | |
| NR_003287.2_RNA28S5_r1.2_28 | /5Biosg/GACACCTGCGTTACCGTTTGACAGGTGTACCGCCCCAGTCAAA | 0.716666667 |
| (SEQ ID NO: 88) | CTCCCCACCTGGCACTGTCCCCGGAGCGGGTCGCGCCCGGCCGGCGCGCGG | |
| | CCGGGCGCTTGGCGCCAGAAGCGAGA | |
| NR_003287.2_RNA28S5_r1.2_29 | /5Biosg/GGTCAGAAGGATCGTGAGGCCCCGCTTTCACGGTCTGTATTCG | 0.541666667 |
| (SEQ ID NO: 89) | TACTGAAAATCAAGATCAAGCGAGCTTTTGCCCTTCTGCTCCACGGGAGGT | |
| | TTCTGTCCTCCCTGAGCTCGCCTTAG | |
| NR_003287.2_RNA28S5_r1.2_30 | /5Biosg/CAATGATAGGAAGAGCCGACATCGAAGGATCAAAAAGCGACGT | 0.483333333 |
| (SEQ ID NO: 90) | CGCTATGAACGCTTGGCCGCCACAAGCCAGTTATCCCTGTGGTAACTTTTC | |
| | TGACACCTCCTGCTTAAAACCCAAAA | |
| NR_003287.2_RNA28S5_r1.2_31 | /5Biosg/TTACCATGGCAACAACACATCATCAGTAGGGTAAAACTAACCT | 0.458333333 |
| (SEQ ID NO: 91) | GTCTCACGACGGTCTAAACCCAGCTCACGTTCCCTATTAGTGGGTGAACAA | |
| | TCCAACGCTTGGTGAATTCTGCTTCA | |
| NR_003287.2_RNA28S5_r1.2_32 | /5Biosg/GATTCTGACTTAGAGGCGTTCAGTCATAATCCCACAGATGGTA | 0.516666667 |
| (SEQ ID NO: 92) | GCTTCGCCCCATTGGCTCCTCAGCCAAGCACATACACCAAATGTCTGAACC | |
| | TGCGGTTCCTCTCGTACTGAGCAGGA | |
| NR_003287.2_RNA28S5_r1.2_33 | /5Biosg/TCCCGCGCGCGCGGGGCGCGTGGAGGGGGGGGGCGGCCCGCCG | 0.825 |
| (SEQ ID NO: 93) | GCGGGGACAGGCGGGGGACCGGCTATCCGAGGCCAACCGAGGCTCCGCGGC | |
| | GCTGCCGTATCGTTCCGCCTGGGCGG | |
| NR_003287.2_RNA28S5_r1.2_34 | /5Biosg/ACGAACGTGCGGTGCGTGACGGGCGAGGGGGCGGCCGCCTCTC | 0.808333333 |
| (SEQ ID NO: 94) | CGGCCGCGCCCCGTTTCCCAGGACGAAGGGCACTCCGCACCGGACCCCGGT | |
| | CCCGGCGCGCGGCGGGGCACGCGCCC | |
| NR_003287.2_RNA28S5_r1.2_35 | /5Biosg/GACAAACCCTTGTGTCGAGGGCTGACTTTCAATAGATCGCAGC | 0.566666667 |
| (SEQ ID NO: 95) | GAGGGAGCTGCTCTGCTACGTACGAAACCCCGACCCAGAAGCAGGTCGTCT | |
| | ACGAATGGTTTAGCGCCAGGTTCCCC | |
| 5SrRNA_X71801_r1_1 | /5Biosg/CTTCCACCACATCGGGCCCGCTCGGAGCAGGGAGTGCTCCGAG | 0.716666667 |
| (SEQ ID NO: 96) | GCGTCAGGGCCCAGGGCCCACGATCCTGGGACGCCCTCCGGTCCTCCGCCC | |
| | TGTCGCGGAGGCAGCGTTTTGGATCC | |
| 5SrRNA_X71801_r1_2 | /5Biosg/CCGCCGGATTGCAGCCGACACCGCCAGCCCGGGGCCGCGGGGC | 0.8 |
| (SEQ ID NO: 97) | TCGGATCGGGGACCCCCGAGCCGCTGGCCCGCGGCCTTCCCCCGGCTCCCG | |
| | CGCTCCCGAGCTTCCACCACATCGGG | |
| 5SrRNA_X71801_r1_3 | /5Biosg/AGCTTCCGAGATCAGACGAGATCGGGCGCGTTCAGGGTGGTAT | 0.7 |
| (SEQ ID NO: 98) | GGCCGTAGACGCTGAAGGAGGCGCCTGGCTGCCCCAAGAGCCCAGCCCCGC | |
| | CCGGCCGTGCCCGCCGGATTGCAGCC | |
| 5SrRNA_X71801_r1_4 | /5Biosg/GGAAGAAAAGGAAAGAAACAGCAAAAAGCCAAAGAAAAAGCCT | 0.503333333 |
| (SEQ ID NO: 99) | ACAGCACCCGGTATTCCCAGGCGGTCTCCCATCCAAGTACTAACCAGGCCC | |
| | GACCCTGCTTAGCTTCCGAGATCAGA | |
| 5SrRNA_X71801_r1_5 | /5Biosg/GAGGCTGAGGCCGGGGAATGGCGTGGACCCGGGAGGCGGAGCT | 0.666666667 |
| (SEQ ID NO: 100) | TGCAGTGAGCCGAGATGGCGCCACCGCACTCCAGCCTGGGCGACAGGGCGA | |
| | GACTCCGTCTGGAAGAAAAGGAAAGA | |
| 5SrRNA_X71801_r1_6 | /5Biosg/GAGCTCCAGACCATCCCGGCTAACAGGGTGAAAGCCCGTCTCT | 0.633333333 |
| (SEQ ID NO: 101) | AGGAAAAATAGAACAAAGTAGCCGGGCGTGGTGGCGGGCGCCTGTAGGCCC | |
| | AGCTACTCGGGAGGCTGAGGCCGGGG | |
| RNA5-8S5_NR_003285_r1_1 | /5Biosg/CCGGGGCCGCAAGTGCGTTCGAAGTGTCGATGATCAATGTGTC | 0.541666667 |
| (SEQ ID NO: 102) | CTGCAATTCACATTAATTCTCGCAGCTAGCTCCGTTCTTCATCGACGCACG | |
| | AGCCGAGTGATCCACCGCTAAGAGTC | |
| RNA5-8S5_NR_003285_r1_2 | /5Biosg/AAGCGACGCTCAGACAGGCGTAGCCCCGGGAGGAACCCGGGGC | 0.558333333 |
| (SEQ ID NO: 103) | CGCAAGTGCGTTCGAAGTGTCGATGATCAATGTGTCCTGCAATTCACATTA | |
| | ATTCTCGCAGCTAGCTGCGTTCTTCA | |

APPENDIX 3
120-mer DNA rRNA Capture Probes/
Baits at 1x coverage, 85% GC restriction
(Note: /5Biosg/ = 5′-biotin)

| Name | Sequence | GC content |
|---|---|---|
| KF899911.1_12SrRNA_r1_1 | /5Biosg/GCGTGCTTGATGCTTGTCCCTTTTGATCGTGGTGATTTAGAGG | 0.45 |
| (SEQ ID NO: 104) | GTGAACTCACTGGAACGGGGATGCTTGCATGTGTAATCTTACTAAGAGCTA | |
| | ATAGAAAGGCTAGGACCAAACCTATT | |
| KF899911.1_12SrRNA_r1_2 | /5Biosg/GAAATTGACCTACCCTGGGGTTAGTATAGCTTAGTTAAACTTT | 0.45 |
| (SEQ ID NO: 105) | CGTTTATTGCTAAAGGTTAATCACTGCTGTTTCCCGTGGGGGTGTGGCTAG | |
| | GCTAAGCGTTTTGAGCTGCATTGCTG | |
| KF899911.1_12SrRNA_r1_3 | /5Biosg/ACTGGAGTTTTTTACAACTCAGGTGAGTTTTAGCTTTATTGGG | 0.483333333 |
| (SEQ ID NO: 106) | GAGGGGGTGATCTAAAACACTCTTTACGCCGGCTTCTATTGACTTGGGTTA | |
| | ATCGTGTGACCGCGGTGGCTGGCACG | |
| KF899911.1_12SrRNA_r1_4 | /5Biosg/TGTTGATTTAACTGTTGAGGTTTAGGGCTAAGCATAGTGGGGT | 0.383333333 |
| (SEQ ID NO: 107) | ATCTAATCCCAGTTTGGGTCTTAGCTATTGTGTGTTCAGATATGTTAAAGC | |
| | CACTTTCGTAGTCTATTTTGTGTCAA | |
| KF899911.1_12SrRNA_r1_5 | /5Biosg/GAGGTGGTGAGGTTGATCGGGGTTTATCGATTACAGAACAGGC | 0.508333333 |
| (SEQ ID NO: 108) | TCCTCTAGAGGGATATGAAGCACCGCCAGGTCCTTTGAGTTTTAAGCTGTG | |
| | GCTCGTAGTGTTCTGGCGAGCAGTTT | |
| KF699911.1_12SrRNA_r1_6 | /5Biosg/GCCCATTTCTTGCCACCTCATGGGCTACACCTTGACCTAACGT | 0.5 |
| (SEQ ID NO: 109) | CTTTACGTGGGTACTTGCGCTTACTTTGTAGCCTTCATCAGGGTTTGCTGA | |
| | AGATGGCGGTATATAGGCTGAGCAAG | |
| KF899911.1_12SrRNA_r1_7 | /5Biosg/TGTGTACGCGCTTCAGGGCCCTGTTCAACTAAGCACTCTACTC | 0.45 |
| (SEQ ID NO: 110) | TCAGTTTACTGCTAAATCCACCTTCGACCCTTAAGTTTCATAAGGGCTATC | |
| | GTAGTTTTCTGGGGTAGAAAATGTAG | |
| KF899911.1_12SrRNA_r1_8 | /5Biosg/GTTCGTCCAAGTGCACTTTCCAGTACACTTACCATGTTACGAC | 0.441666667 |
| (SEQ ID NO: 111) | TTGTCTCCTCTATATAAATGCGTAGGGGTTTTAGTTAAATGTCCTTTGAAG | |
| | TATACTTGAGGAGGGTGACGGGCGGT | |
| KF899911.1_16SrRNA_r1_1 | /5Biosg/TTGCGGTACTATATCTATTGCGCCAGGTTTCAATTTCTATCGC | 0.425 |
| (SEQ ID NO: 112) | CTATACTTTATTTGGGTAAATGGTTTGGTTAAGGTTGTCTGGTAGTAAGGT | |
| | GGAGTGGGTTTGGGGCTAGGTTTAGC | |
| KF699911.1_16SrRNA_r1_2 | /5Biosg/GTTTCGGGGGTCTTAGCTTTGGCTCTCCTTGCAAAGTTATTTC | 0.375 |
| (SEQ ID NO: 113) | TAGTTAATTCATTATGCAGAAGGTATAGGGGTTAGTCCTTGCTATATTATG | |
| | CTTGGTTATAATTTTTCATCTTTCCC | |
| KF899911.1_16SrRNA_r1_3 | /5Biosg/ATCTTGGACAACCAGCTATCACCAGGCTCGGTAGGTTTGTCGC | 0.466666667 |
| (SEQ ID NO: 114) | CTCTACCTATAAATCTTCCCACTATTTTGCTACATAGACGGGTGTGCTCTT | |
| | TTAGCTGTTCTTAGGTAGCTCGTCTG | |
| KF899911.1_16SrRNA_r1_4 | /5Biosg/CTCTCTCTACAAGGTTTTTTCCTAGTGTCCAAAGAGCTGTTCC | 0.375 |
| (SEQ ID NO: 115) | TCTTTGGACTAACAGTTAAATTTACAAGGGGATTTAGAGGGTTCTGTGGGC | |
| | AAATTTAAAGTTGAACTAAGATTCTA | |
| KF899911.1_16SrRNA_r1_5 | /5Biosg/CCAATTGGGTGTGAGGAGTTCAGTTATATGTTTGGGATTTTTT | 0.391666667 |
| (SEQ ID NO: 116) | AGGTAGTGGGTGTTGAGCTTGAACGCTTTCTTAATTGGTGGCTGCTTTTAG | |
| | GCCTACTATGGGTGTTAAATTTTTTA | |
| KF699911.1_16SrRNA_r1_6 | /5Biosg/GTAGATATTGGGCTGT1AATTGTCAGTTCAGTGTTTTAATCTG | 0.366666667 |
| (SEQ ID NO: 117) | ACGCAGGCTTATGCGGAGGAGAATGTTTTCATGTTACTTATACTAACATTA | |
| | GTTCTTCTATAGGGTGATAGATTGGT | |
| KF899911.1_16SrRNA_r1_7 | /5Biosg/TGTTTTTGGTAAACAGGCGGGGTAAGATTTGCCGAGTTCCTTT | 0.4 |
| (SEQ ID NO: 116) | TACTTTTTTTAACCTTTCCTTATGAGCATGCCTGTGTTGGGTTGACAGTGA | |
| | GGGTAATAATGACTTGTTGGTTGATT | |
| KF899911.1_16SrRNA_r1_8 | /5Biosg/TACAGGTCCCTATTTAAGGAACAAGTGATTATGCTACCTTTGC | 0.5 |
| (SEQ ID NO: 119) | ACGGTTAGGGTACCGCGGCCGTTAAACATGTGTCACTGGGCAGGCGGTGCC | |
| | TCTAATACTGGTGATGCTAGAGGTGA | |
| KF899911.1_16SrRNA_r1_9 | /5Biosg/TTAATAAATTAAAGCTCCATAGGGTCTTCTCGTCTTGCTGTGT | 0.466666667 |
| (SEQ ID NO: 120) | CATGCCCGCCTCTTCACGGGCAGGTCAATTTCACTGGTTAAAAGTAAGAGA | |
| | CAGCTGAACCCTCGTGGAGCCATTCA | |
| KF699911.1_16SrRNA_r1_10 | /5Biosg/TGGTGAAGTCTTAGCATGTACTGCTCGGAGGTTGGGTTCTGCT | 0.483333333 |
| (SEQ ID NO: 121) | CCGAGGTCGCCCCAACCGAAATTTTTAATGCAGGTTTGGTAGTTTAGGACC | |
| | TGTGGGTTTGTTAGGTACTGTTTGCA | |
| KF899911.1_16SrRNA_r1_11 | /5Biosg/GAGGTCGTAAACCCTATTGTTGATATGGACTCTAGAATAGGAT | 0.408333333 |
| (SEQ ID NO: 122) | TGCGCTGTTATCCCTAGGGTAACTTGTTCCGTTGGTCAAGTTATTGGATCA | |
| | ATTGAGTATAGTAGTTCGCTTTGACT | |
| KF899911.1_16SrRNA_r1_12 | /5Biosg/AAGTAGATAGAAACCGACCTGGATTACTCCGGTCTGAACTCAG | 0.458333333 |
| (SEQ ID NO: 123) | ATCACGTAGGACTTTAATCGTTGAACAAACGAACCTTTAATAGCGGCTGCA | |
| | CCATCGGGATGTCCTGATCCAACATC | |
| KF899911.1_16SrRNA_r1_13 | /5Biosg/AAACCCTGTTCTTGGGTGGGTGTGGGTATAATACTAAGTTGAG | 0.441666667 |
| (SEQ ID NO: 124) | ATGATATCATTTACGGGGGAAGGCGCTTTGTGAAGTAGGCCTTATTTCTCT | |
| | TGTCCTTTCGTACAGGGAGGAATTTG | |
| NR_003286.2_RNA18S5_r1_l | /5Biosg/AAGGAACCATAACTGATTTAATGAGCCATTCGCAGTTTCACTG | 0.458333333 |
| (SEQ ID NO: 125) | TACCGGCCGTGCGTACTCAGACATGCATGGCTTAATCTTTGAGACAAGCAT | |
| | ATGCTACTGGCAGGATCAACCAGGTA | |
| NR_003286.2_RNA18S5_r1_2 | /5Biosg/GTTGGTTTTGATCTGATAAATGCACGCATCCCCCCCGCGAAGG | 0.533333333 |
| (SEQ ID NO: 126) | GGGTCAGCGCCCGTCGGCATGTATTAGCTCTAGAATTACCACAGTTATCCA | |
| | AGTAGGAGAGGAGCGAGCGACCAAAG | |
| NR_003286.2_RNA18S5_r1_3 | /5Biosg/GACGTTCGAATGGGTCGTCGCCGCCACGGGGGGCGTGCGATCG | 0.741666667 |
| (SEQ ID NO: 127) | GCCCGAGGTTATCTAGAGTCACCAAAGCCGCCGGCGCCCGCCCCCCGGCCG | |
| | GGGCCGGAGAGGGGCTGACCGGGTTG | |
| NR_003286.2_RNA18S5_r1_4 | /5Biosg/CTTCCTTGGATGTGGTAGCCGTTTCTCAGGCTCCCTCTCCGGA | 0.575 |
| (SEQ ID NO: 128) | ATCGAACCCTGATTCCCCGTCACCCGTGGTCACCATGGTAGGCACGGCGAC | |
| | TACCATCGAAAGTTGATAGGGCAGAC | |
| NR_003286.2_RNA18S5_r1_5 | /5Biosg/CGTTAAAGGATTTAAAGTGGACTCATTCCAATTACAGGGCCTC | 0.491666667 |
| (SEQ ID NO: 129) | GAAAGAGTCCTGTATTGTTATTTTTCGTCACTACCTCCCCGGGTCGGGAGT | |
| | GGGTAATTTGCGCGCCTGCTGCCTTC | |
| NR_003286.2_RNA18S5_r1_6 | /5Biosg/GCCCGCCCGCTCCCAAGATCCAACTACGAGCTTTTTAACTGCA | 0.533333333 |
| (SEQ ID NO: 130) | GCAACTTTAATATACGCTATTGGAGCTGGAATTACCGCGGCTGCTGGCACC | |
| | AGACTTGCCCTCCAATGGATCCTCGT | |
| NR_003286.2_RNA18S5_r1_7 | /5Biosg/ACTCTAATTTTTTCAAAGTAAACGCTTCGGGCCCCGCGGGACA | 0.666666667 |
| (SEQ ID NO: 131) | CTCAGCTAAGAGCATCGAGGGGGCGCCGAGAGGCAAGGGGCGGGGACGGGC | |
| | GGTGGCTCGCCTCGCGGCGGACCGCC | |
| NR_003286.2_RNA18S5_r1_8 | /5Biosg/CCCCCGGCCGTCCCTCTTAATCATGGCCTCAGTTCCGAAAACC | 0.55 |
| (SEQ ID NO: 132) | AACAAAATAGAACCGCGGTCCTATTCCATTATTCCTAGCTGCGGTATCCAG | |
| | GCGGCTCGGGCCTGCTTTGAACACTC | |
| NR_003286.2_RNA18S5_r1_9 | /5Biosg/GTCTTCGAACCTCCGACTTTCGTTCTTGATTAATGAAAACATT | 0.491666667 |
| (SEQ ID NO: 133) | CTTGGCAAATGCTTTCGCTCTGGTCCGTCTTGCGCCGGTCCAAGAATTTCA | |
| | CCTCTAGCGGCGCAATACGAATGCCC | |
| NR_003286.2_RNA18S5_r1_10 | /5Biosg/CCCCCCGGAACCCAAAGACTTTGGTTTCCCGGAAGCTGCCCGG | 0.608333333 |
| (SEQ ID NO: 134) | CGGGTCATGGGAATAACGCCGCCGCATCGCCGGTCGGCATCGTTTATGGTC | |
| | GGAACTACGACGGTATCTGATCGTCT | |
| NR_003286.2_RNA18S5_r1_11 | /5Biosg/CCTGTCCGTGTCCGGGCCGGGTGAGGTTTCCCGTGTTGAGTCA | 0.558333333 |
| (SEQ ID NO: 135) | AATTAAGCCGCAGGCTCCACTCCTGGTGGTGCCCTTCCGTCAATTCCTTTA | |
| | AGTTTCAGCTTTGCAACCATACTCCC | |
| NR_003286.2_RNA18S5_r1_12 | /5Biosg/GTTAGCATGCCAGAGTCTCGTTCGTTATCGGAATTAACCAGAC | 0.483333333 |
| (SEQ ID NO: 136) | AAATCGCTCCACCAACTAAGAACGGCCATGCACCACCACCCACGGAATCGA | |
| | GAAAGAGCTATCAATCTGTCAATCCT | |
| NR_003286.2_RNA18S5_r1_13 | /5Biosg/AGCCCCGGACATCTAAGGGCATCACAGACCTGTTATTGCTCAA | 0.575 |
| (SEQ ID NO: 137) | TCTCGGGTGGCTGAACGCCACTTGTCCCTCTAAGAAGTTGGGGGACGCCGA | |
| | CCGCTCGGGGGTCGCGTAACTAGTTA | |
| NR_003286.2_RNA18S5_r1_14 | /5Biosg/CGTTCATGGGGAATAATTGCAATCCCCGATCCCCATCACGAAT | 0.616666667 |
| (SEQ ID NO: 136) | GGGGTTCAACGGGTTACCCGCGCCTGCCGGCGTAGGGTAGGCACACGCTGA | |
| | GCCAGTCAGTGTAGCGCGCGTGCAGC | |
| NR_003286.2_RNA18S5_r1_15 | /5Biosg/GGGCCGATCCGAGGGCCTCACTAAACCATCCAATCGGTAGTAG | 0.55 |
| (SEQ ID NO: 139) | CGACGGGCGGTGTGTACAAAGGGCAGGGACTTAATCAACGCAAGCTTATGA | |
| | CCCGCACTTACTGGGAATTCCTCGTT | |
| NR_003286.2_RNA18S5_r1_16 | /5Biosg/TAATGATCCTTCCGCAGGTTCACCTACGGAAACCTTGTTACGA | 0.575 |
| (SEQ ID NO: 140) | CTTTTACTTCCTCTAGATAGTCAAGTTCGACCGTCTTCTCAGCGCTCCGCC | |
| | AGGGCCGTGGGCCGACCCCGGCGGGG | |
| NR_003287.2_RNA28S5_r1.1_1 | /5Biosg/TCGGCGCTGGGCTCTTCCCTGTTCACTCGCCGTTACTGAGGGA | 0.55 |
| (SEQ ID NO: 141) | ATCCTGGTTAGTTTCTTCTCCTCCGCTGACTAATATGCTTAAATTCAGCGG | |
| | GTCGCCACGTCTGATCTGAGGTCGCG | |
| NR_003287.2_RNA28S5_r1.1_2 | /5Biosg/TCCACGGGCTGGGCCTCGATCAGAAGGACTTGGGCCCCCCACG | 0.758333333 |
| (SEQ ID NO: 142) | AGCGGCGCCGGGGAGCGGGTCTTCCGTACGCCACATGTCCCGCGCCCCGCC | |
| | GCGGGGCGGGGATTCGGCGCTGGGCT | |
| NR_003287.2_RNA28S5_r1.1_3 | /5Biosg/TAGCCTTAGATGGAGTTTACCACCCGCTTTGGGCTGCATTCCC | 0.691666667 |
| (SEQ ID NO: 143) | AAGCAACCCGACTCCGGGAAGACCCGGGCCCGGCGCGCCGGGGGCCGCTAC | |
| | CGGCCTCACACCGTCCACGGGCTGGG | |
| NR_003287.2_RNA28S5_r1.1_4 | /5Biosg/CACCCGTTTACCTCTTAACGGTTTCACGCCCTCTTGAACTCTC | 0.458333333 |
| (SEQ ID NO: 144) | TCTTCAAAGTTCTTTTCAACTTTCCCTTACGGTACTTGTTGACTATCGGTC | |
| | TCGTGCCGGTATTTAGCCTTAGATGG | |
| NR_003287.2_RNA28S5_r1.1_5 | /5Biosg/CGGGTGGAGGGGTCGGGAGGAACGGGGGGCGGGAAAGATCCGC | 0.758333333 |
| (SEQ ID NO: 145) | CGGGCCGCCGACACGGCCGGACCCGCCGCCGGGTTGAATCCTCCGGGCGGA | |
| | CTGCGCGGACCCCACCCGTTTACCTC | |
| NR_003287.2_RNA28S5_r1.1_7 | /5Biosg/CCCCCCGAGCCACCTTCCCCGCCGGGCCTTCCCAGCCGTCCCG | 0.833333333 |
| (SEQ ID NO: 146) | GAGCCGGTCGCGGCGCACCGCCGCGGTGGAAATGCGCCCGGCGGCGGCCGG | |
| | TCGCCGGTCGGGGGACGGTCCCCCGC | |
| NR_003287.2_RNA28S5_r1.2_1 | /5Biosg/GAGGGGGGAGAGCGCGGCGACGGGTCTCGCTCCCTCGGCCCCG | 0.791666667 |
| (SEQ ID NO: 147) | GGATTCGGCGAGTGCTGCTGCCGGGGGGGCTGTAACACTCGGGGGGGGTTT | |
| | CGGTCCCGCCGCCGCCGCCGCCGCCG | |
| NR_003287.2_RNA28S5_r1.2_4 | /5Biosg/GCACGTGTTAGACTCCTTGGTCCGTGTTTCAAGACGGGTCGGG | 0.725 |
| (SEQ ID NO: 148) | TGGGTAGCCGACGTCGCCGCCGACCCCGTGCGCTCGCTCCGCCGTCCCCCT | |
| | CTTCGGGGGACGCGCGCGTGGCCCCG | |
| NR_003287.2_RNA28S5_r1.2_5 | /5Biosg/CGGGCCGGTGGTGCGCCCTCGGCGGACTGGAGAGGCCTCGGGA | 0.758333333 |
| (SEQ ID NO: 149) | TCCCACCTCGGCCGGCGAGCGCGCCGGCCTTCACCTTCATTGCGCCACGGC | |
| | GGCTTTCGTGCGAGCCCCCGACTCGC | |
| NR_003287.2_RNA28S5_r1.2_6 | /5Biosg/GGACCGCTACGGACCTCCACCAGAGTTTCCTCTGGCTTCGCCC | 0.658333333 |
| (SEQ ID NO: 150) | TGCCCAGGCATAGTTCACCATCTTTCGGGTCCTAACACGTGCGCTCGTGCT | |
| | CCACCTCCCCGGCGCGGCGGGCGAGA | |
| NR_003287.2_RNA28S5_r1.2_7 | /5Biosg/TGCGTCGGGTCTGCGAGAGCGCCAGCTATCCTGAGGGAAACTT | 0.666667566 |
| (SEQ ID NO: 151) | CGGAGGGAACCAGCTACTAGATGGTTCGATTAGTCTTTCGCCCCTATACCC | |
| | AGGTCGGACGACCGATTTGCACGTCA | |
| NR_003287.2_RNA28S5_r1.2_8 | /5Biosg/CCGGCTCCACGCCAGCGAGCCGGGCTTCTTACCCATTTAAAGT | 0.541666667 |
| (SEQ ID NO: 152) | TTGAGAATAGGTTGAGATCGTTTCGGCCCCAAGACCTCTAATCATTCGCTT | |
| | TACCGGATAAAACTGCGTGGCGGGGG | |
| NR_003287.2_RNA28S5_r1.2_9 | /5Biosg/AACACCTTTTCTGGGGTCTGATGAGCGTCGGCATCGGGCGCCT | 0.6 |
| (SEQ ID NO: 153) | TAACCCGGCGTTCGGTTCATCCCGCAGCGCCAGTTCTGCTTACCAAAAGTG | |
| | GCCCACTAGGCACTCGCATTCCACGC | |
| NR_003287.2_RNA28S5_r1.2_10 | /5Biosg/ATGGGCCCGACGCTCCAGCGCCATCCATTTTCAGGGCTAGTTG | 0.55 |
| (SEQ ID NO: 154) | ATTCGGCAGGTGAGTTGTTACACACTCCTTAGCGGATTCCGACTTCCATGG | |
| | CCACCGTCCTGCTGTCTATATCAACC | |
| NR_003287.2_RNA28S5_r1.2_11 | /5Biosg/GAAGGACCCCACACCCCCGCCGCCGCCGCCGCCGCCGCCCTCC | 0.833333333 |
| (SEQ ID NO: 155) | GACGCACACCACACGCGCGCGCGCGCGCGCCGCCCCCGCCGCTCCCGTCCA | |
| | CTCTCGACTGCCGGCGACGGCCGGGT | |
| NR_003287.2_RNA28S5_r1.2_12 | /5Biosg/GCTTCAAGGCTCACCGCAGCGGCCCTCCTACTCGTCGCGGCGT | 0.808333333 |
| (SEQ ID NO: 156) | AGCGTCCGCGGGGCTCCGGGGGCGGGGAGCGGGGCGTGGGCGGGAGGAGGG | |
| | GAGGAGGCGTGGGGGGGGGGGCGGGG | |
| NR_003287.2_RNA28S5_r1.2_13 | /5Biosg/GTTCAACTGCTGTTCACATGGAACCCTTCTCCACTTCGGCCTT | 0.558333333 |
| (SEQ ID NO: 157) | CAAAGTTCTCGTTTGAATATTTGCTACTACCACCAAGATCTGCACCTGCGG | |
| | CGGCTCCACCCGGGCCCGCGCCCTAG | |
| NR_003287.2_RNA28S5_r1.2_14 | /5Biosg/CCGCCACTCCGGATTCGGGGATCTGAACCCGACTCCCTTTCGA | 0.666666667 |
| (SEQ ID NO: 158) | TCGGCCGAGGGCAACGGAGGCCATCGCCCGTCCCTTCGGAACGGCGCTCGC | |
| | CCATCTCTCAGGACCGACTGACCCAT | |
| NR_003287.2_RNA28S5_r1.2_15 | /5Biosg/GGCGAACCCATTCCAGGGCGCCCTGCCCTTCACAAAGAAAAGA | 0.675 |
| (SEQ ID NO: 159) | GAACTCTCCCCGGGGCTCCCGCCGGCTTCTCCGGGATCGGTCGCGTTACCG | |
| | CACTGGACGCCTCGCGGCGCCCATCT | |
| NR_003287.2_RNA28S5_r1.2_16 | /5Biosg/ATATGGGTACGGCCCGGCGCGAGATTTACACCCTCTCCCCCGG | 0.666666667 |
| (SEQ ID NO: 160) | ATTTTCAAGGGCCAGCGAGAGCTCACCGGACGCCGCCGGAACCGCGACGCT | |
| | TTCCAAGGCACGGGCCCCTCTCTCGG | |
| NR_003287.2_RNA28S5_r1.2_17 | /5Biosg/CGACCGACCCAGCCCTTAGAGCCAATCCTTATCCCGAAGTTAC | 0.566666667 |
| (SEQ ID NO: 161) | GGATCCGGCTTGCCGACTTCCCTTACCTACATTGTTCCAACATGCCAGAGG | |
| | CTGTTCACCTTGGAGACCTGCTGCGG | |
| NR_003287.2_RNA28S5_r1.2_19 | /5Biosg/GCCCCTGCCGCCCCGACCCTTCTCCCCCCGCCGCCGCCCCCAC | 0.825 |
| (SEQ ID NO: 162) | GCGGCGCTCCCCCGGGGAGGGGGGAGGACGGGGAGCGGGGGAGAGAGAGAG | |
| | AGAGAGGGCGCGGGGCGGGGAGGGAG | |
| NR_003287.2_RNA28S5_r1.2_23 | /5Biosg/TTCCCCTGGTCCGCACCAGTTCTAAGTCGGCTGCTAGGCGCCG | 0.816666667 |
| (SEQ ID NO: 163) | GCCGAGGCGAGGCGCCGCGCGGAACCGCGGCCCCGGGGGCGGACCCGGCGG | |
| | GGGGGACCGGCCCGCGGCCCCTCCGC | |
| NR_003287.2_RNA28S5_r1.2_24 | /5Biosg/CGTTTACCCGCGCTTCATTGAATTTCTTCACTTTGACATTCAG | 0.491666667 |
| (SEQ ID NO: 164) | AGCACTGGGCAGAAATCACATCGCGTCAACACCCGCCGCGGGCCTTCGCGA | |
| | TGCTTTGTTTTAATTAAACAGTCGGA | |
| NR_003287.2_RNA28S5_r1.2_25 | /5Biosg/GGCTGTGGTTTCGCTGGATAGTAGGTAGGGACAGTGGGAATCT | 0.491666667 |
| (SEQ ID NO: 165) | CGTTCATCCATTCATGCGCGTCACTAATTAGATGACGAGGCATTTGGCTAC | |
| | CTTAAGAGAGTCATAGTTACTCCCGC | |
| NR_003287.2_RNA28S5_r1.2_26 | /5Biosg/GGGGGGGCGCCGGGGGCCTCCCACTTATTCTACACCTCTCATG | 0.6 |
| (SEQ ID NO: 166) | TCTCTTCACCGTGCCAGACTAGAGTCAAGCTCAACAGGGTCTTCTTTCCCC | |
| | GCTGATTCCGCCAAGCCCGTTCCCTT | |
| NR_003287.2_RNA28S5_r1.2_27 | /5Biosg/GCCCCTCGGGGCTCGCCCCCCCGCCTCACCGGGTCAGTGAAAA | 0.741666667 |
| (SEQ ID NO: 167) | AACGATCAGAGTAGTGGTATTTCACCGGCGGCCCGCAGGGCCGGCGGACCC | |
| | CGCCCCGGGCCCCTCGCGGGGACACC | |
| NR_003287.2_RNA28S5_r1.2_28 | /5Biosg/GACACCTGCGTTACCGTTTGACAGGTGTACCGCCCCAGTCAAA | 0.716666667 |
| (SEQ ID NO: 168) | CTCCCCACCTGGCACTGTCCCCGGAGCGGGTCGCGCCCGGCCGGCGCGCGG | |
| | CCGGGCGCTTGGCGCCAGAAGCGAGA | |
| NR_003287.2_RNA28S5_r1.2_29 | /5Biosg/GGTCAGAAGGATCGTGAGGCCCCGCTTTCACGGTCTGTATTCG | 0.541666667 |
| (SEQ ID NO: 169) | TACTGAAAATCAAGATCAAGCGAGCTTTTGCCCTTCTGCTCCACGGGAGGT | |
| | TTCTGTCCTCCCTGAGCTCGCCTTAG | |
| NR_003287.2_RNA28S5_r1.2_30 | /5Biosg/CAATGATAGGAAGAGCCGACATCGAAGGATCAAAAAGCGACGT | 0.483333333 |
| (SEQ ID NO: 170) | CGCTATGAACGCTTGGCCGCCACAAGCCAGTTATCCCTGTGGTAACTTTTC | |
| | TGACACCTCCTGCTTAAAACCCAAAA | |
| NR_003287.2_RNA28S5_r1.2_31 | /5Biosg/TTACCATGGCAACAACACATCATCAGTAGGGTAAAACTAACCT | 0.458333333 |
| (SEQ ID NO: 171) | GTCTCACGACGGTCTAAACCCAGCTCACGTTCCCTATTAGTGGGTGAACAA | |
| | TCCAACGCTTGGTGAATTCTGCTTCA | |
| NR_003287.2_RNA28S5_r1.2_32 | /5Biosg/GATTCTGACTTAGAGGCGTTCAGTCATAATCCCACAGATGGTA | 0.516666667 |
| (SEQ ID NO: 172) | GCTTCGCCCCATTGGCTCCTCAGCCAAGCACATACACCAAATGTCTGAACC | |
| | TGCGGTTCCTCTCGTACTGAGCAGGA | |
| NR_003287.2_RNA28S5_r1.2_33 | /5Biosg/TCCCGCGCGCGCGGGGCGCGTGGAGGGGGGGGGCGGCCCGCCG | 0.825 |
| (SEQ ID NO: 173) | GCGGGGACAGGCGGGGGACCGGCTATCCGAGGCCAACCGAGGCTCCGCGGC | |
| | GCTGCCGTATCGTTCCGCCTGGGCGG | |
| NR_003287.2_RNA28S5_r1.2_34 | /5Biosg/ACGAACGTGCGGTGCGTGACGGGCGAGGGGGCGGCCGCCTCTC | 0.808333333 |
| (SEQ ID NO: 174) | CGGCCGCGCCCCGTTTCCCAGGACGAAGGGCACTCCGCACCGGACCCCGGT | |
| | CCCGGCGCGCGGCGGGGCACGCGCCC | |
| NR_003287.2_RNA28S5_r1.2_35 | /5Biosg/GACAAACCCTTGTGTCGAGGGCTGACTTTCAATAGATCGCAGC | 0.566666667 |
| (SEQ ID NO: 175) | GAGGGAGCTGCTCTGCTACGTACGAAACCCCGACCCAGAAGCAGGTCGTCT | |
| | ACGAATGGTTTAGCGCCAGGTTCCCC | |
| 5SrRNA_X71801_r1_1 | /5Biosg/CTTCCACCACATCGGGCCCGCTCGGAGCAGGGAGTGCTCCGAG | 0.716666667 |
| (SEQ ID NO: 176) | GCGTCAGGGCCCAGGGCCCACGATCCTGGGACGCCCTCCGGTCCTCCGCCC | |
| | TGTCGCGGAGGCAGCGTTTTGGATCC | |
| 5SrRNA_X71801_r1_2 | /5Biosg/CCGCCGGATTGCAGCCGACACCGCCAGCCCGGGGCCGCGGGGC | 0.8 |
| (SEQ ID NO: 177) | TCGGATCGGGGACCCCCGAGCCGCTGGCCCGCGGCCTTCCCCCGGCTCCCG | |
| | CGCTCCCGAGCTTCCACCACATCGGG | |
| 5SrRNA_X71801_r1_3 | /5Biosg/AGCTTCCGAGATCAGACGAGATCGGGCGCGTTCAGGGTGGTAT | 0.7 |
| (SEQ ID NO: 178) | GGCCGTAGACGCTGAAGGAGGCGCCTGGCTGCCCCAAGAGCCCAGCCCCGC | |
| | CCGCCCGTGCCCGCCGGATTGCAGCC | |
| 5SrRNA_X71801_r1_4 | /5Biosg/GGAAGAAAAGGAAAGAAACAGCAAAAAGCCAAAGAAAAAGCCT | 0.508333333 |
| (SEQ ID NO: 179) | ACAGCACCCGGTATTCCCAGGCGGTCTCCCATCCAAGTACTAACCAGGCCC | |
| | GACCCTGCTTAGCTTCCGAGATCAGA | |
| 5SrRNA_X71801_r1_5 | /5Biosg/GAGGCTGAGGCCGGGGAATGGCGTGGACCCGGGAGGCGGAGCT | 0.666666667 |
| (SEQ ID NO: 180) | TGCAGTGAGCCGAGATGGCGCCACCGCACTCCAGCCTGGGCGACAGGGCGA | |
| | GACTCCGTCTGGAAGAAAAGGAAAGA | |
| 5SrRNA_X71801_r1_6 | /5Biosg/GAGCTCCAGACCATCCCGGCTAACAGGGTGAAAGCCCGTCTCT | 0.633333333 |
| (SEQ ID NO: 181) | AGGAAAAATAGAACAAAGTAGCCGGGCGTGGTGGCGGGCGCCTGTAGGCCC | |
| | AGCTACTCGGGAGGCTGAGGCCGGGG | |
| RNA5-8S5_NR_003285_r1_1 | /5Biosg/CCGGGGCCGCAAGTGCGTTCGAAGTGTCGATGATCAATGTGTC | 0.541666667 |
| (SEQ ID NO: 182) | CTGCAATTCACATTAATTCTCGCAGCTAGCTGCGTTCTTCATCGACGCACG | |
| | AGCCGAGTGATCCACCGCTAAGAGTC | |
| RNA5-8S5_NR_003285_r1_2 | /5Biosg/AAGCGACGCTCAGACAGGCGTAGCCCCGGGAGGAACCCGGGGC | 0.558333333 |
| (SEQ ID NO: 183) | CGCAAGTGCGTTCGAAGTGTCGATGATCAATGTGTCCTGCAATTCACATTA | |
| | ATTCTCGCAGCTAGCTGCGTTCTTCA | |

APPENDIX 4
120-mer DNA rRNA Capture Probes/
Baits at 2x coverage
(Note: /5Biosg/ = 5′-biotin)

| Name | Sequence | GC content |
|---|---|---|
| KF899911.1_12SrRNA_r1_1 | /5Biosg/GCGTGCTTGATGCTTGTCCCTTTTGATCGTGGTGATTTAGAGG | 0.45 |
| (SEQ ID NO: 184) | GTGAACTCACTGGAACGGGGATGCTTGCATGTGTAATCTTACTAAGAGCTA | |
| | ATAGAAAGGCTAGGACCAAACCTATT | |
| KF899911.1_12SrRNA_r1_2 | /5Biosg/TTAATCACTGCTGTTTCCCGTGGGGGTGTGGCTAGGCTAAGCG | 0.508333333 |
| (SEQ ID NO: 185) | TTTTGAGCTGCATTGCTGCGTGCTTGATGCTTGTCCCTTTTGATCGTGGTG | |
| | ATTTAGAGGGTGAACTCACTGGAACG | |
| KF899911.1_12SrRNA_r1_3 | /5Biosg/GAAATTGACCAACCCTGGGGTTAGTATAGCTTAGTTAAACTTT | 0.45 |
| (SEQ ID NO: 186) | CGTTTATTGCTAAAGGTTAATCACTGCTGTTTCCCGTGGGGGTGTGGCTAG | |
| | GCTAAGCGTTTTGAGCTGCATTGCTG | |
| KF899911.1_12SrRNA_r1_4 | /5Biosg/ACACTCTTTACGCCGGCTTCTATTGACTTGGGTTTATCGTGTG | 0.458333333 |
| (SEQ ID NO: 187) | ACCGCGGTGGCTGGCACGAAATTGACCAACCCTGGGGTTAGTATAGCTTAG | |
| | TTAAACTTTCGTTTATTGCTAAAGGT | |
| KF899911.1_12SrRNA_r1_5 | /5Biosg/ACTGGAGTTTTTTACAACTCAGGTGAGTTTTAGCTTTATTGGG | 0.483333333 |
| (SEQ ID NO: 188) | GAGGGGGTGATCTAAAACACTCTTTACGCCGGCTTCTATTGACTTGGGTTA | |
| | ATCGTGTGACCGCGGTGGCTGGCACG | |
| KF899911.1_12SrRNA_r1_6 | /5Biosg/GGTCTTAGCTATTGTGTGTTCAGATATGTTAAAGCCACTTTCG | 0.383333333 |
| (SEQ ID NO: 189) | TAGTCTATTTTCTGTCAACTGGAGTTTTTTACAACTCAGGTGAGTTTTAGC | |
| | TTTATTGGGGAGGGGGTGATCTAAAA | |
| KF899911.1_12SrRNA_r1_7 | /5Biosg/TGTTGATTTAACTGTTGAGGTTTAGGGCTAAGCATAGTGGGGT | 0.383333333 |
| (SEQ ID NO: 190) | ATCTAATCCCAGTTTGGGTCTTAGCTATTGTGTGTTCAGATATGTTAAAGC | |
| | CACTTTCGTAGTCTATTTTGTGTCAA | |
| KF899911.1_12SrRNA_r1_8 | /5Biosg/AAGCACCGCCAGGTCCTTTGAGTTTTAAGCTGTGGCTCGTAGT | 0.466666667 |
| (SEQ ID NO: 191) | GTTCTGGCGAGCAGTTTTGTTGATTTAACTGTTGAGGTTTAGGGCTAAGCA | |
| | TAGTGGGGTATCTAATCCCAGTTTGG | |
| KF899911.1_12SrRNA_r1_9 | /5Biosg/GAGGTGGTGAGGTTGATCGGGGTTTATCGATTACAGAACAGGC | 0.508333333 |
| (SEQ ID NO: 192) | TCCTCTAGAGGGATATGAAGCACCGCCAGGTCCTTTGAGTTTTAAGCTGTG | |
| | GCTCGTAGTGTTCTGGCGAGCAGTTT | |
| KF899911.1_12SrRNA_r1_10 | /5Biosg/CGCTTACTTTGTAGCCTTCATCAGGGTTTGCTGAAGATGGCGG | 0.483333333 |
| (SEQ ID NO: 193) | TATATAGGCTGAGCAAGAGGTGGTGAGGTTGATCGGGGTTTATCGATTACA | |
| | GAACAGGCTCCTCTAGAGGGATATGA | |
| KF899911.1_12SrRNA_r1_11 | /5Biosg/GCCCATTTCTTGCCACCTCATGGGCTACACCTTGACCTAACGT | 0.5 |
| (SEQ ID NO: 194) | CTTTACGTGGGTACTTGCGCTTACTTTGTAGCCTTCATCAGGGTTTGCTGA | |
| | AGATGGCGGTATATAGGCTGAGCAAG | |
| KF899911.1_12SrRNA_r1_12 | /5Biosg/CCACCTTCGACCCTTAAGTTTCATAAGGGCTATCGTAGTTTTC | 0.475 |
| (SEQ ID NO: 195) | TGGGGTAGAAAATGTAGCCCATTTCTTGCCACCTCATGGGCTACACCTTGA | |
| | CCTAACGTCTTTACGTGGGTACTTGC | |
| KF899911.1_12SrRNA_r1_13 | /5Biosg/TGTGTACGCGCTTCAGGGCCCTGTTCAACTAAGCACTCTACTC | 0.45 |
| (SEQ ID NO: 196) | TCAGTTTACTGCTAAATCCACCTTCGACCCTTAAGTTTCATAAGGGCTATC | |
| | GTAGTTTTCTGGGGTAGAAAATGTAG | |
| KF899911.1_12SrRNA_r1_14 | /5Biosg/ATGCGTAGGGGTTTTAGTTAAATGTCCTTTGAAGTATACTTGA | 0.475 |
| (SEQ ID NO: 197) | GGAGGGTGACGGGCGGTGTGTACGCGCTTCAGGGCCCTGTTCAACTAAGCA | |
| | CTCTACTCTCAGTTTACTGCTAAATC | |
| KF899911.1_12SrRNA_r1_15 | /5Biosg/GTTCGTCCAAGTGCACTTTCCAGTACACTTACCATGTTACGAC | 0.441666667 |
| (SEQ ID NO: 198) | TTGTCTCCTCTATATAAATGCGTAGGGGTTTTAGTTAAATGTCCTTTGAAG | |
| | TATACTTGAGGAGGGTGACGGGCGGT | |
| KF899911.1_16SrRNA_r1_1 | /5Biosg/TTGCGGTACTATATCTATTGCGCCAGGTTTCAATTTCTATCGC | 0.425 |
| (SEQ ID NO: 199) | CTATACTTTATTTGGGTAAATGGTTTGGTTAAGGTTGTCTGGTAGTAAGGT | |
| | GGAGTGGGTTTGGGGCTAGGTTTAGC | |
| KF899911.1_16SrRNA_r1_2 | /5Biosg/AGAAGGTATAGGGGTTAGTCCTTGCTATATTATGCTTGGTTAT | 0.366666667 |
| (SEQ ID NO: 200) | AATTTTTCATCTTTCCCTTGCGGTACTATATCTATTGCGCCAGGTTTCAAT | |
| | TTCTATCGCCTATACTTTATTTGGGT | |
| KF899911.1_16SrRNA_r1_3 | /5Biosg/GTTTCGGGGGTCTTAGCTTTGGCTCTCCTTGCAAAGTTATTTC | 0.375 |
| (SEQ ID NO: 201) | TAGTTAATTCATTATGCAGAAGGTATAGGGGTTAGTCCTTGCTATATTATG | |
| | CTTGGTTATAATTTTTCATCTTTCCC | |
| KF899911.1_16SrRNA_r1_4 | /5Biosg/CCCACTATTTTGCTACATAGACGGGTGTGCTCTTTTAGCTGTT | 0.433333333 |
| (SEQ ID NO: 202) | CTTAGGTAGCTCGTCTGGTTTCGGGGGTCTTAGCTTTGGCTCTCCTTGCAA | |
| | AGTTATTTCTAGTTAATTCATTATGC | |
| KF899911.1_16SrRNA_r1_5 | /5Biosg/ATCTTGGACAACCAGCTATCACCAGGCTCGGTAGGTTTGTCGC | 0.466666667 |
| (SEQ ID NO: 203) | CTCTACCTATAAATCTTCCCACTATTTTGCTACATAGACGGGTGTGCTCTT | |
| | TTAGCTGTTCTTACGTAGCTCGTCTG | |
| KF899911.1_16SrRNA_r1_6 | /5Biosg/TAAATTTACAAGGGGATTTAGAGGGTTCTGTGGGCAAATTTAA | 0.4 |
| (SEQ ID NO: 204) | AGTTGAACTAAGATTCTATCTTGGACAACCAGCTATCACCAGGCTCGGTAG | |
| | GTTTGTCGCCTCTACCTATAAATCTT | |
| KF899911.1_16SrRNA_r1_7 | /5Biosg/CTCTCTCTACAAGGTTTTTTCCTAGTGTCCAAAGAGCTGTTCC | 0.375 |
| (SEQ ID NO: 205) | TCTTTGGACTAACAGTTAAATTTACAAGGGGATTTAGAGGGTTCTGTGGGC | |
| | AAATTTAAAGTTGAACTAAGATTCTA | |
| KF899911.1_16SrRNA_r1_8 | /5Biosg/CTTGAACGCTTTCTTAATTGGTGGCTGCTTTTAGGCCTACTAT | 0.391666667 |
| (SEQ ID NO: 206) | GGGTGTTAAATTTTTTACTCTCTCTACAAGGTTTTTTCCTAGTGTCCAAAG | |
| | AGCTGTTCCTCTTTGGACTAACAGTT | |
| KF899911.1_16SrRNA_r1_9 | /5Biosg/CCAATTGGGTGTGAGGAGTTCAGTTATATGTTTGGGATTTTTT | 0.391666667 |
| (SEQ ID NO: 207) | AGGTAGTGGGTGTTGACCTTGAACGCTTTCTTAATTGGTGGCTGCTTTTAG | |
| | GCCTACTATGGGTGTTAAATTTTTTA | |
| KF899911.1_16SrRNA_r1_10 | /5Biosg/GGAGAATGTTTTCATGTTACTTATACTAACATTAGTTCTTCTA | 0.366666667 |
| (SEQ ID NO: 208) | TAGGGTGATAGATTGGTCCAATTGGGTGTGAGGAGTTCAGTTATATGTTTG | |
| | GGATTTTTTAGGTAGTGGGTGTTGAG | |
| KF899911.1_16SrRNA_r1_11 | /5Biosg/GTAGATATTGGGCTGTTAATTGTCAGTTCAGTGTTTTAATCTG | 0.366666667 |
| (SEQ ID NO: 209) | ACGAAGGCTTATGCGGAGGAGAATGTTTTCATGTTACTTATACTAACATTA | |
| | GTTCTTCTATAGGGTGATAGATTGGT | |
| KF899911.1_16SrRNA_r1_12 | /5Biosg/CCTTATGAGCATGCCTGTGTTGGGTTGACAGTGAGGGTAATAA | 0.425 |
| (SEQ ID NO: 210) | TGACTTGTTGGTTGATTGTAGATATTGGGCTGTTAATTGTCAGTTCAGTGT | |
| | TTTAATCTGACGCAGGCTTATGCGGA | |
| KF899911.1_16SrRNA_r1_13 | /5Biosg/TGTTTTTGGTAAACAGGCGGGGTAAGATTTGCCGAGTTCCTTT | 0.4 |
| (SEQ ID NO: 211) | TACTTTTTTTAACCTTTCCTTATGAGCATGCCTGTGTTGGGTTGACAGTGA | |
| | GGGTAATAATGACTTGTTGGTTGATT | |
| KF899911.1_16SrRNA_r1_14 | /5Biosg/GCCGTTAAACATGTGTCACTGGGCAGGCGGTGCCTCTAATACT | 0.45 |
| (SEQ ID NO: 212) | GGTGATGCTAGAGGTGATGTTTTTGGTAAACAGGCGGGGTAAGATTTGCCG | |
| | AGTTCCTTTTACTTTTTTTAACCTTT | |
| KF899911.1_16SrRNA_r1_15 | /5Biosg/TACAGGTCCCTATTTAAGGAACAAGTGATTATGCTACCTTTGC | 0.5 |
| (SEQ ID NO: 213) | ACGGTTAGGGTACCGCGGCCGTTAAACATGTGTCACTGGGCAGGCGGTGCC | |
| | TCTAATACTGGTGATGCTAGACGTGA | |
| KF899911.1_16SrRNA_r1_16 | /5Biosg/GGGCAGGTCAATTTCACTGGTTATTAGTAAGAGACAGCTGAAC | 0.475 |
| (SEQ ID NO: 214) | CCTCGTGGAGCCATTCATACAGGTCCCTATTTAAGGAACAAGTGATTATGC | |
| | TACCTTTGCACGGTTAGGGTACCGCG | |
| KF899911.1_16SrRNA_r1_17 | /5Biosg/TTAATAAATTAAAGCTCCATAGGGTCTTCTCGTCTTGCTGTGT | 0.466666667 |
| (SEQ ID NO: 215) | CATGCCCGCCTCTTCACGGGCAGGTCAATTTCACTGGTTAAAAGTAAGAGA | |
| | CAGCTGAACCCTCGTGGAGCCATTCA | |
| KF899911.1_16SrRNA_r1_18 | /5Biosg/GAAATTTTTAATGCAGGTTTGGTAGTTTAGGACCTGTGGGTTT | 0.416666667 |
| (SEQ ID NO: 216) | GTTAGGTACTGTTTGCATTAATAAATTAAAGCTCCATAGGGTCTTCTCGTC | |
| | TTGCTGTGTCATGCCCGCCTCTTCAC | |
| KF899911.1_16SrRNA_r1_19 | /5Biosg/GGTGAAGTCTTAGCATGTACTGCTCGGAGGTTGGGTTCTGCTC | 0.483333333 |
| (SEQ ID NO: 217) | CGAGGTCGCCCCAACCGAAATTTTTAATGCAGGTTTGGTACTTTAGGACCT | |
| | GTGGGTTTGTTAGGTACTGTTTGCAT | |
| KF899911.1_16SrRNA_r1_20 | /5Biosg/GGTAACTTGTTCCGTTGGTCAAGTTATTGGATCAATTGAGTAT | 0.491666667 |
| (SEQ ID NO: 218) | AGTAGTTCGCTTTGACTGGTGAAGTCTTAGCATGTACTGCTCGGAGGTTGG | |
| | GTTCTGCTCTGAGGTCGCCCCAACCG | |
| KF899911.1_16SrRNA_r1_21 | /5Biosg/GAGGTCGTAAACCCTATTGTTGATATGGACTCTAGAATAGGAT | 0.408333333 |
| (SEQ ID NO: 219) | TGCGCTGTTATCCCTACGGTAACTTGTTCCGTTGGTCAAGTTATTGGATCA | |
| | ATTGAGTATAGTACTTCGCTTTGACT | |
| KF899911.1_16SrRNA_r1_22 | /5Biosg/TCGTTGAACAAACGAACCTTTAATAGCGGCTGCACCATCGGGA | 0.458333333 |
| (SEQ ID NO: 220) | TGTCCTGATCCAACATCGAGGTCGTAAACCCTATTGTTGATATGGACTCTA | |
| | GAATAGGATTGCGCTGTTATCCCTAG | |
| KF899911.1_16SrRNA_r1_23 | /5Biosg/AAGTAGATAGAAACCGACCTGGATTACTCCGGTCTGAACTCAG | 0.458333333 |
| (SEQ ID NO: 221) | ATCACGTAGGACTTTAATCGTTGAACAAACaAACCTTTAATAGCGGCTGCA | |
| | CCATCGGGATGTCCTGATCCAACATC | |
| KF899911.1_16SrRNA_r1_24 | /5Biosg/GGAAGGCGCTTTGTGAAGTAGGCCTTATTTCTCTTGTCCTTTC | 0.45 |
| (SEQ ID NO: 222) | GTACAGGGAGGAATTTGAAGTAGATAGAAACCGACCTGGATTACTCCGGTC | |
| | TGAACTCAGATCACGTAGGACTTTAA | |
| KF899911.1_16SrRNA_r1_25 | /5Biosg/AAACCCTGTTCTTGGGTGGGTGTGGGTATAATACTAAGTTGAG | 0.441666667 |
| (SEQ ID NO: 223) | ATGATATCATTTACGGGGGAAGGCGCTTTGTGAAGTAGGCCTTATTTCTCT | |
| | TGTCCTTTCGTACAGGGAGGAATTTG | |
| NR_003286.2_RNA18S5_r1_1 | /5Biosg/AAGGAACCATAACTGATTTAATGAGCCATTCGCAGTTTCACTG | 0.458333333 |
| (SEQ ID NO: 224) | TACCGGCCGTGCGTACTCAGACATGCATGGCTTAATCTTTGAGACAAGCAT | |
| | ATGCTACTGGCAGGATCAACCAGGTA | |
| NR_003286.2_RNA18S5_r1_2 | /5Biosg/GCATGTATTAGCTCTAGAATTACCACAGTTATCCAAGTAGGAG | 0.466666667 |
| (SEQ ID NO: 225) | AGGAGCGAGCGACCAAAGGAACCATAACTGATTTAATGAGCCATTCGCAGT | |
| | TTCACTGTACCGGCCGTGCGTACTCA | |
| NR_003286.2_RNA18S5_r1_3 | /5Biosg/GTTGGTTTTGATCTGATAAATGCACGCATCCCCCCCGCGAAGG | 0.533333333 |
| (SEQ ID NO: 226) | GGGTCAGCGCCCGTCGGCATGTATTAGCTCTAGAATTACCACAGTTATCCA | |
| | AGTAGGAGAGGAGCGAGCGACCAAAG | |
| NR_003286.2_RNA18S5_r1_4 | /5Biosg/GAGTCACCAAAGCCGCCGGCGCCCGCCCCCCGGCCGGGGCCGG | 0.716666667 |
| (SEQ ID NO: 227) | AGAGGGGCTGACCGGGTTGGTTTTGATCTGATAAATGCACGCATCCCCCCC | |
| | GCGAAGGGGGTCAGCGCCCGTCGGCA | |
| NR_003286.2_RNA18S5_r1_5 | /5Biosg/GTCGTTCGAATGGGTCGTCGCCGCCACGGGGGGCGTGCGATCG | 0.741666667 |
| (SEQ ID NO: 228) | GCCCGAGGTTATCTAGAGTCACCAAAGCCGCCGGCGCCCGCCCCCCGGCCG | |
| | GGGCCGGAGAGGGGCTGACCGGGTTG | |
| NR_003286.2_RNA18S5_r1_6 | /5Biosg/CCGTCACCCGTGGTaACCATGGTAGGCACGGCGACTACCATCG | 0.625 |
| (SEQ ID NO: 229) | AAAGTTGATAGGGCAGACGTTCGAATGGGTCGTCGCCGCCACGGGGGGCGT | |
| | GCGATCGGCCCGAGGTTATCTAGAGT | |
| NR_003286.2_RNA18S5_r1_7 | /5Biosg/CTTCCTTGGATGTGGTAGCCGTTTCTCAGGCTCCCTCTCCGGA | 0.575 |
| (SEQ ID NO: 230) | ATCGAACCCTGATTCCCCGTCACCCGTGGTCACCATGGTAGGCACGGCGAC | |
| | TACCATCGAAAGTTGATAGGGCAGAC | |
| NR_003286.2_RNA18S5_r1_8 | /5Biosg/TGTTATTTTTCGTCACTACCTCCCCGGGTCGGGAGTGGGTAAT | 0.575 |
| (SEQ ID NO: 231) | TTGCGCGCCTGCTGCCTTCCTTGGATGTGGTAGCCGTTTCTCAGGCTCCCT | |
| | CTCCGGAATCGAACCCTGATTCCCCG | |
| NR_003286.2_RNA18S5_r1_9 | /5Biosg/CGTTAAAGGATTTAAAGTGGACTCATTCCAATTACAGGGCCTC | 0.491666667 |
| (SEQ ID NO: 232) | GAAAGAGTCCTGTATTGTTATTTTTCGTCACTACCTCCCCGGGTCGGGAGT | |
| | GGGTAATTTGCGCGCCTGCTGCCTTC | |
| NR_003286.2_RNA18S5_r1_10 | /5Biosg/GCTATTGGAGCTGGAATTACCGCGGCTGCTGGCACCAGACTTG | 0.491666667 |
| (SEQ ID NO: 233) | CCCTCCAATGGATCCTCGTTAAAGGATTTAAAGTGGACTCATTCCAATTAC | |
| | AGGGCCTCGAAAGAGTCCTGTATTGT | |
| NR_003286.2_RNA18S5_r1_11 | /5Biosg/GCCCGCCCGCTCCCAAGATCCAACTACGAGCTTTTTAACTGCA | 0.533333333 |
| (SEQ ID NO: 234) | GCAACTTTAATATACGCTATTGGAGCTGGAATTACCGCGGCTGCTGGCACC | |
| | AGACTTGCCCTCCAATGGATCCTCGT | |
| NR_003286.2_RNA18S5_r1_12 | /5Biosg/GAGGGGGCGCCGAGAGGCAAGGGGCGGGGACGGGCGGTGGCTC | 0.65 |
| (SEQ ID NO: 235) | GCCTCGCGGCGGACCGCCCGCCCGCTCCCAAGATCCAACTACGAGCTTTTT | |
| | AACTGCAGCAACTTTAATATACGCTA | |
| NR_003286.2_RNA18S5_r1_13 | /5Biosg/ACTCTAATTTTTTCAAAGTAAACGCTTCGGGCCCCGCGGGACA | 0.666666667 |
| (SEQ ID NO: 236) | CTCAGCTAAAAGCATCGAGGGGGCGCCGAGAGGCAAGGGGCGGGGACGGGC | |
| | GGTGGCTCGCCTCGCGGCGGACCGCC | |
| NR_003286.2_RNA18S5_r1_14 | /5Biosg/CGGTCCTATTCCATTATTCCTAGCTGCGGTATCCAGGCGGCTC | 0.533333333 |
| (SEQ ID NO: 237) | GGGCCTGCTTTGAACACTCTAATTTTTTCAAAGTAAACGCTTCGGGCCCCG | |
| | CGGGACACTCAGCTAAGAGCATCGAG | |
| NR_003286.2_RNA18S5_r1_15 | /5Biosg/CCCCCGGCCGTCCCTCTTAATCATGGCCTCAGTTCCGAAAACC | 0.55 |
| (SEQ ID NO: 238) | AACAAAATAGAACCGCGGTCCTATTCCATTATTCCTAGCTGCGGTATCCAG | |
| | GCGGCTCGGGCCTGCTTTGAACACTC | |
| NR_003286.2_RNA18S5_r1_16 | /5Biosg/GCTCTGGTCCGTCTTGCGCCGGTCCAAGAATTTCACCTCTAGC | 0.558333333 |
| (SEQ ID NO: 239) | GGCGCAATACGAATGCCCCCGGCCGTCCCTCTTAATCATGGCCTCAGTTCC | |
| | GAAAACCAACAAAATAGAACCGCGGT | |
| NR_003286.2_RNA18S5_r1_17 | /5Biosg/GTCTTCGAACCTCCGACTTTCGTTCTTGATTAATGAAAACATT | 0.491666667 |
| (SEQ ID NO: 240) | CTTGGCAAATGCTTTCGCTCTGGTCCGTCTTGCGCCGGTCCAAGAATTTCA | |
| | CCTCTAGCGGCGCAATACGAATGCCC | |
| NR_003286.2_RNA18S5_r1_18 | /5Biosg/ACGCCGCCGCATCGCCGGTCGGCATCGTTTATGGTCGGAACTA | 0.5 |
| (SEQ ID NO: 241) | CGACGGTATCTGATCGTCTTCGAACCTCCGACTTTCGTTCTTGATTAATGA | |
| | AAACATTCTTGGCAAATGCTTTCGCT | |
| NR_003286.2_RNA18S5_r1_19 | /5Biosg/CCCCCCGGAACCCAAAGACTTTGGTTTCCCGGAAGCTGCCCGG | 0.608333333 |
| (SEQ ID NO: 242) | CGGGTCATGGGAATAACGCCGCCGCATCGCCGGTCGGCATCGTTTATGGTC | |
| | GGAACTACGACGGTATCTGATCGTCT | |
| NR_003286.2_RNA18S5_r1_20 | /5Biosg/TCCACTCCTGGTGGTGCCCTTCCGTCAATTCCTTTAAGTTTCA | 0.55 |
| (SEQ ID NO: 243) | GCTTTGCAACCATACTCCCCCCGGAACCCAAAGACTTTGGTTTCCCGGAAG | |
| | CTGCCCGGCGGGTCATGGGAATAACG | |
| NR_003286.2_RNA18S5_r1_21 | /5Biosg/CCTGTCCGTGTCCGGGCCGGGTGAGGTTTCCCGTGTTGAGTCA | 0.558333333 |
| (SEQ ID NO: 244) | AATTAAGCCGCAGGCTCCACTCCTGGTGGTGCCCTTCCGTCAATTCCTTTA | |
| | AGTTTCAGCTTTGCAACCATACTCCC | |
| NR_003286.2_RNA18S5_r1_22 | /5Biosg/TAAGAACGGCCATGCACCACCACCCACGGAATCGAGAAAGAGC | 0.55 |
| (SEQ ID NO: 245) | TATCAATCTGTCAATCCTGTCCGTGTCCGGGCCGGGTGAGGTTTCCCGTGT | |
| | TGAGTCAAATTAAGCCGCAGGCTCCA | |
| NR_003286.2_RNA18S5_r1_23 | /5Biosg/GTTAGCATGCCAGAGTCTCGTTCGTTATCGGAATTAACCAGAC | 0.483333333 |
| (SEQ ID NO: 246) | AAATCGCTCCACCAACTAAGAACGGCCATGCACCACCACCCACGGAATCGA | |
| | GAAAGAGCTATCAATCTGTCAATCCT | |
| NR_003286.2_RNA18S5_r1_24 | /5Biosg/CGCCACTTGTCCCTCTAAGAAGTTGGGGGACGCCGACCGCTCG | 0.541666667 |
| (SEQ ID NO: 247) | GGGGTCGCGTAACTAGTTAGCATGCCAGAGTCTCGTTCGTTATCGGAATTA | |
| | ACCAGACAAATCGCTCCACCAACTAA | |
| NR_003286.2_RNA18S5_r1_25 | /5Biosg/AGCCCCGGACATCTAAGGGCATCACAGACCTGTTATTGCTCAA | 0.575 |
| (SEQ ID NO: 248) | TCTCGGGTGGCTGAACGCCACTTGTCCCTCTAAGAAGTTGGGGGACGCCGA | |
| | CCGCTCGGGGGTCGCGTAACTAGTTA | |
| NR_003286.2_RNA18S5_r1_26 | /5Biosg/CCCGCGCCTGCCGGCGTAGGGTAGGCACACGCTGAGCCAGTCA | 0.641666667 |
| (SEQ ID NO: 249) | GTGTAGCGCGCGTGCAGCCCCGGACATCTAAGGGCATCACAGACCTGTTAT | |
| | TGCTCAATCTCGGGTGGCTGAACGCC | |
| NR_003286.2_RNA18S5_r1_27 | /5Biosg/CGTTCATGGGGAATAATTGCAATCCCCGATCCCCATCACGAAT | 0.616666667 |
| (SEQ ID NO: 250) | GGGGTTCAACGGGTTACCCGCGCCTGCCGGCGTAGGGTAGGCACACGCTGA | |
| | GCCAGTCAGTGTAGCGCGCGTGCAGC | |
| NR_003286.2_RNA18S5_r1_28 | /5Biosg/ACAAAGGGCAGGGACTTAATCAACGCAAGCTTATGACCCGCAC | 0.508333333 |
| (SEQ ID NO: 251) | TTACTGGGAATTCCTCGTTCATGGGGAATAATTGCAATCCCCGATCCCCAT | |
| | CACGAATGGGGTTCAACGGGTTACCC | |
| NR_003286.2_RNA18S5_r1_29 | /5Biosg/GGGCCGATCCGAGGGCCTCACTAAACCATCCAATCGGTAGTAG | 0.55 |
| (SEQ ID NO: 252) | CGACGGGCGGTGTGTACAAAGGGCAGGGACTTAATCAACGCAAGCTTATGA | |
| | CCCGCACTTACTGGGAATTCCTCGTT | |
| NR_003286.2_RNA18S5_r1_30 | /5Biosg/GATAGTCAAGTTCGACCGTCTTCTCAGCGCTCCGCCAGGGCCG | 0.65 |
| (SEQ ID NO: 253) | TGGGCCGACCCCGGCGGGGCCGATCCGAGGGCCTCACTAAACCATCCAATC | |
| | GGTAGTAGCGACGGGCGGTGTGTACA | |
| NR_003286.2_RNA18S5_r1_31 | /5Biosg/TAATGATCCTTCCGCAGGTTCACCTACGGAAACCTTGTTACGA | 0.575 |
| (SEQ ID NO: 254) | CTTTTACTTCCTCTAGATAGTCAAGTTCGACCGTCTTCTCAGCGCTCCGCC | |
| | AGGGCCGTGGGCCGACCCCGGCGGGG | |
| NR_003287.2_RNA28S5_r1.1_1 | /5Biosg/TCGGCGCTGGGCTCTTCCCTGTTCACTCGCCGTTACTGAGGGA | 0.55 |
| (SEQ ID NO: 255) | ATCCTGGTTAGTTTCTTCTCCTCCGCTGACTAATATGCTTAAATTCAGCGG | |
| | GTCGCCACGTCTGATCTGAGGTCGCG | |
| NR_003287.2_RNA28S5_r1.1_2 | /5Biosg/GCCGGGGAGCGGGTCTTCCGTACGCCACATGTCCCGCGCCCCG | 0.666666667 |
| (SEQ ID NO: 256) | CCGCGGGGCGGGGATTCGGCGCTGGGCTCTTCCCTGTTCACTCGCCGTTAC | |
| | TGAGGGAATCCTGGTTAGTTTCTTCT | |
| NR_003287.2_RNA28S5_r1.1_3 | /5Biosg/TCACACCGTCCACGGGCTGGGCCTCGATCAGAAGGACTTGGGC | 0.75 |
| (SEQ ID NO: 257) | CCCCCACGAGCGGCGCCGGGGAGCGGGTCTTCCGTACGCCACATGTCCCGC | |
| | GCCCCGCCGCGGGGCGGGGATTCGGC | |
| NR_003287.2_RNA28S5_r1.1_4 | /5Biosg/CCAAGCAACCCGACTCCGGGAAGACCCGGGCCCGGCGCGCCGG | 0.766666667 |
| (SEQ ID NO: 258) | GGGCCGCTACCGGCCTCACACCGTCCACGGGCTGGGCCTCGATCAGAAGGA | |
| | CTTGGGCCCCCCACGAGCGGCGCCGG | |
| NR_003287.2_RNA28S5_r1.1_5 | /5Biosg/GTCTCGTGCCGGTATTTAGCCTTAGATGGAGTTTACCACCCGC | 0.658333333 |
| (SEQ ID NO: 259) | TTTGGGCTGCATTCCCAAGCAACCCGACTCCGGGAAGACCCGGGCCCGGCG | |
| | CGCCGGGGGCCGCTACCGGCCTCACA | |
| NR_003287.2_RNA28S5_r1.1_6 | /5Biosg/TTGAACTCTCTCTTCAAAGTTCTTTTCAACTTTCCCTTACGGT | 0.458333333 |
| (SEQ ID NO: 260) | ACTTGTTGACTATCGGTCTCGTGCCGGTATTTAGCCTTAGATGGAGTTTAC | |
| | CACCCGCTTTGGGCTGCATTCCCAAG | |
| NR_003287.2_RNA28S5_r1.1_7 | /5Biosg/CCTCCGGGCGGACTGCGCGGACCCCACCCGTTTACCTCTTAAC | 0.525 |
| (SEQ ID NO: 261) | GGTTTCACGCCCTCTTGAACTCTCTCTTCAAAGTTCTTTTCAACTTTCCCT | |
| | TACGGTACTTGTTGACTATCGGTCTC | |
| NR_003287.2_RNA28S5_r1.1_8 | /5Biosg/GGGGGCGGGAAAGATCCGCCGGGCCGCCGACACGGCCGGACCC | 0.7 |
| (SEQ ID NO: 262) | GCCGCCGGGTTGAATCCTCCGGGCGGACTGCGCGGACCCCACCCGTTTACC | |
| | TCTTAACGGTTTCACGCCCTCTTGAA | |
| NR_003287.2_RNA28S5_r1.1_9 | /5Biosg/GAGGAGGAGGAGGGGCGGCGGGGGAAGGGAGGGCGGGTGGAGG | 0.775 |
| (SEQ ID NO: 263) | GGTCGGGAGGAACGGGGGGCGGGAAAGATCCGCCGGGCCGCCGACACGGCC | |
| | GGACCCGCCGCCGGGTTGAATCCTCC | |
| NR_003287.2_RNA28S5_r1.1_10 | /5Biosg/CCCCACCCCCGGCCCCGCCCGCCCACCCCCGCACCCGCCGGAG | 0.85 |
| (SEQ ID NO: 264) | CCCGCCCCCTCCGGGGAGGAGGAGGAGGGGCGGCGGGGGTAGGGAGGGCGG | |
| | GTGGAGGGGTCGGGAGGAACGGGGGG | |
| NR_003287.2_RNA28S5_r1.1_11 | /5Biosg/CGGTGGAAATGCGCCCGGCGGCGGCCGGTCGCCGGTCGGGGGA | 0.858333333 |
| (SEQ ID NO: 265) | CGGTCCCCCGCCGACCCCACCCCCGGCCCCGCCCGCCCACCCCCGCACCCG | |
| | CCGGAGCCCGCCCCCTCCGGGGAGGA | |
| NR_003287.2_RNA28S5_r1.1_12 | /5Biosg/GCCACCTTCCCCGCCGGGCCTTCCCAGCCGTCCCGGAGCCGGT | 0.825 |
| (SEQ ID NO: 266) | CGCGGCGCACCGCCGCGGTGGAAATGCGCCCGGCGGCGGCCGGTCGCCGGT | |
| | CGGGGGACGGTCCCCCGCCGACCCCA | |
| NR_003287.2_RNA28S5_r1.1_13 | /5Biosg/GGGGGGCGGAGACGGGGGAGGAGGAGGACGGACGGACGGACGG | 0.816666667 |
| (SEQ ID NO: 267) | ACGGGGCCCCCCGAGCCACCTTCCCCGCCGGGCCTTCCCAGCCGTCCCGGA | |
| | GCCGGTCGCGGCGCACCGCCGCGGTG | |
| NR_003287.2_RNA28S5_r1.1_14 | /5Biosg/ACCGCCGCCGCCGCCGCCGCCCCGACCCGCGCGCCCTCCCGAG | 0.85 |
| (SEQ ID NO: 268) | GGAGGACGCGGGGCCGGGGGGCGGAGACGGGGGAGGAGGAGGACGGACGGA | |
| | CGGACGGACGGGGCCCCCCGAGCCAC | |
| NR_003287.2_RNA28S5_r1.2_1 | /5Biosg/GAGGGGGGAGAGCGCGGCGACGGGTCTCGCTCCCTCGGCCCCG | 0.791666667 |
| (SEQ ID NO: 269) | GGATTCGGCGAGTGCTGCTGCCGGGGGGGCTGTAACACTCGGGGGGGGTTT | |
| | CGGTCCCGCCGCCGCCGCCGCCGCCG | |
| NR_003287.2_RNA28S5_r1.2_2 | /5Biosg/GGCGCGCCCCCGCGGGGGAGACCCCCCTCGCGGGGGATTCCCC | 0.825 |
| (SEQ ID NO: 270) | GCGGGGGTGGGCGCCGGGAGGGGGGAGAGCGCGGCGACGGGTCTCGCTCCC | |
| | TCGGCCCCGGGATTCGGCGAGTGCTG | |
| NR_003287.2_RNA28S5_r1.2_3 | /5Biosg/GGGGTGGGAGAGCGGTCGCGCCGTGGGAGGGGTGGCCCGGCCC | 0.85 |
| (SEQ ID NO: 271) | CCCCACGAGGAGACGCCGGCGCGCCCCCGCGGGGGAGACCCCCCTCGCGGG | |
| | GGATTCCCCGCGGGGGTGGGCGCCGG | |
| NR_003287.2_RNA28S5_r1.2_4 | /5Biosg/CCCGCCCCCCGACCCGCGCGCGGCACCCCCCCCCGTCGCCGGG | 0.866666667 |
| (SEQ ID NO: 272) | GCGGGGGCGCGGGAGGAGGGGTGGGAGAGCGGTCGCGCCGTGGGAGGGGTG | |
| | GCCCGGCCCCCCCACGAGGAGACGCC | |
| NR_003287.2_RNA28S5_r1.2_5 | /5Biosg/AGAGAACCTCCCCCGGGCCCGACGGCGCGACCCGCCCGGGGCG | 0.858333333 |
| (SEQ ID NO: 273) | CACTGGGGACAGTCCGCCCCGCCCCCCGACCCGCGCGCGGCACCCCCCCCG | |
| | TCGCCGGGGCGGGGGCGCGGGGAGGA | |
| NR_003287.2_RNA28S5_r1.2_6 | /5Biosg/CGCCGACCCCGTGCGCTCGCTCCGCCGTCCCCCTCTTCGGGGG | 0.816666667 |
| (SEQ ID NO: 274) | ACGCGCGCGTGGCCCCGAGAGAACCTCCCCCGGGCCCGACGGCGCGACCCG | |
| | CCCGGGGCGCACTGGGGACAGTCCGC | |
| NR_003287.2_RNA28S5_r1.2_7 | /5Biosg/GCACGTGTTAGACTCCTTGGTCCGTGTTTCAAGACGGGTCGGG | 0.725 |
| (SEQ ID NO: 275) | TGGGTAGCCGACGTCGCCGCCGACCCCGTGCGCTCGCTCCGCCGTCCCCCT | |
| | CTTCGGGGGACGCGCGCGTGGCCCCG | |
| NR_003287.2_RNA28S5_r1.2_8 | /5Biosg/AGCGCGCCGGCCTTCACCTTCATTGCGCCACGGCGGCTTTCGT | 0.666666667 |
| (SEQ ID NO: 276) | GCGAGCCCCCGACTCGCGCACGTGTTAGACTCCTTGGTCCGTGTTTCAAGA | |
| | CGGGTCGGGTGGGTAGCCGACGTCGC | |
| NR_003287.2_RNA28S5_r1.2_9 | /5Biosg/CGGGCCGGTGGTGCGCCCTCGGCGGACTGGAGAGGCCTCGGGA | 0.758333333 |
| (SEQ ID NO: 277) | TCCCACCTCGGCCGGCGAGCGCGCCGGCCTTCACCTTCATTGCGCCACGGC | |
| | GGCTTTCGTGCGAGCCCCCGACTCGC | |
| NR_003287.2_RNA28S5_r1.2_10 | /5Biosg/CCATCTTTCGGGTCCTAACACGTGCGCTCGTGCTCCACCTCCC | 0.75 |
| (SEQ ID NO: 278) | CGGCGCGGCGGGCGAGACGGGCCGGTGGTGCGCCCTCGGCGGACTGGAGAG | |
| | GCCTCGGGATCCCACCTCGGCCGGCG | |
| NR_003287.2_RNA28S5_r1.2_11 | /5Biosg/GGACCGCTACGGACCTCCACCAGAGTTTCCTCTGGCTTCGCCC | 0.658333333 |
| (SEQ ID NO: 279) | TGCCCAGGCATAGTTCACCATCTTTCGGGTCCTAACACGTGCGCTCGTGCT | |
| | CCACCTCCCCGGCGCGGCGGGCGAGA | |
| NR_003287.2_RNA28S5_r1.2_12 | /5Biosg/TAGATGGTTCGATTAGTCTTTCGCCCCTATACCCAGGTCGGAC | 0.566666667 |
| (SEQ ID NO: 280) | GACCGATTTGCACGTCAGGACCGCTACGGACCTCCACCAGAGTTTCCTCTG | |
| | GCTTCGCCCTGCCCAGGCATAGTTCA | |
| NR_003287.2_RNA28S5_r1.2_13 | /5Biosg/TGCGTCGGGTCTGCGAGAGCGCCAGCTATCCTGAGGGAAACTT | 0.566666667 |
| (SEQ ID NO: 281) | CGGAGGGAACCAGCTACTAGATGGTTCGATTAGTCTTTCGCCCCTATACCC | |
| | AGGTCGGACGACCGATTTGCACGTCA | |
| NR_003287.2_RNA28S5_r1.2_14 | /5Biosg/TCGTTTCGGCCCCAAGACCTCTAATCATTCGCTTTACCGGATA | 0.583333333 |
| (SEQ ID NO: 282) | AAACTGCGTGGCGGGGGTGCGTCGGGTCTGCGAGAGCGCCAGCTATCCTGA | |
| | GGGAAACTTCGGAGGGAACCAGCTAC | |
| NR_003287.2_RNA28S5_r1.2_15 | /5Biosg/CCGGCTCCACGCCAGCGAGCCGGGCTTCTTACCCATTTAAAGT | 0.541666667 |
| (SEQ ID NO: 283) | TTGAGAATAGGTTGAGATCGTTTCGGCCCCAAGACCTCTAATCATTCGCTT | |
| | TACCGGATAAAACTGCGTGGCGGGGG | |
| NR_003287.2_RNA28S5_r1.2_16 | /5Biosg/CATCCCGCAGCGCCAGTTCTGCTTACCAAAAGTGGCCCACTAG | 0.566666667 |
| (SEQ ID NO: 284) | GCACTCGCATTCCACGCCCGGCTCCACGCCAGCGAGCCGGGCTTCTTACCC | |
| | ATTTAAAGTTTGAGAATAGGTTGAGA | |
| NR_003287.2_RNA28S5_r1.2_17 | /5Biosg/AACACCTTTTCTGGGGTCTGATGAGCGTCGGCATCGGGCGCCT | 0.6 |
| (SEQ ID NO: 285) | TAACCCGGCGTTCGGTTCATCCCGCAGCGCCAGTTCTGCTTACCAAAAGTG | |
| | GCCCACTAGGCACTCGCATTCCACGC | |
| NR_003287.2_RNA28S5_r1.2_18 | /5Biosg/TTACACACTCCTTAGCGGATTCCGACTTCCATGGCCACCGTCC | 0.558333333 |
| (SEQ ID NO: 286) | TGCTGTCTATATCAACCAACACCTTTTCTGGGGTCTGATGAGCGTCGGCAT | |
| | CGGGCGCCTTAACCCGGCGTTCGGTT | |
| NR_003287.2_RNA28S5_r1.2_19 | /5Biosg/ATGGGCCCGACGCTCCAGCGCCATCCATTTTCAGGGCTAGTTG | 0.55 |
| (SEQ ID NO: 287) | ATTCGGCAGGTGAGTTGTTACACACTCCTTAGCGGATTCCGACTTCCATGG | |
| | CCACCGTCCTGCTGTCTATATCAACC | |
| NR_003287.2_RNA28S5_r1.2_20 | /5Biosg/CGCGCGCGCGCGCCGCCCCCGCCGCTCCCGTCCACTCTCGACT | 0.716666667 |
| (SEQ ID NO: 288) | GCCGGCGACGGCCGGGTATGGGCCCGACGCTCCAGCGCCATCCATTTTCAG | |
| | GGCTAGTTGATTCGGCAGGTGAGTTG | |
| NR_003287.2_RNA28S5_r1.2_21 | /5Biosg/GAAGGACCCCACACCCCCGCCGCCGCCGCCGCCGCCGCCCTCC | 0.833333333 |
| (SEQ ID NO: 289) | GACGCACACCACACGCGCGCGCGCGCGCGCCGCCCCCGCCGCTCCCGTCCA | |
| | CTCTCGACTGCCGGCGACGGCCGGGT | |
| NR_003287.2_RNA28S5_r1.2_22 | /5Biosg/GGGGGCGGGGAGCGGGGCGTGGGCGGGAGGAGGGGAGGAGGCG | 0.85 |
| (SEQ ID NO: 290) | TGGGGGGGGGGGCGGGGGAAGGACCCCACACCCCCGCCGCCGCCGCCGCCG | |
| | CCGCCCTCCGACGCACACCACACGCG | |
| NR_003287.2_RNA28S5_r1.2_23 | /5Biosg/GCTTCAAGGCTCACCGCAGCGGCCCTCCTACTCGTCGCGGCGT | 0.808333333 |
| (SEQ ID NO: 291) | AGCGTCCGCGGGGCTCCGGGGGCGGGGAGCGGGGCGTGGGCGGGAGGAGGG | |
| | GAGGAGGCGTGGGGGGGGGGGCGGGG | |
| NR_003287.2_RNA28S5_r1.2_24 | /5Biosg/TATTTGCTACTACCACCAAGATCTGCACCTGCGGCGGCTCCAC | 0.691666667 |
| (SEQ ID NO: 292) | CCGGGCCCGCGCCCTAGGCTTCAAGGCTCACCGCAGCGGCCCTCCTACTCG | |
| | TCGCGGCGTAGCGTCCGCGGGGCTCC | |
| NR_003287.2_RNA28S5_r1.2_25 | /5Biosg/GTTCAACTGCTGTTCACATGGAACCCTTCTCCACTTCGGCCTT | 0.558333333 |
| (SEQ ID NO: 293) | CAAAGTTCTCGTTTGAATATTTGCTACTACCACCAAGATCTGCACCTGCGG | |
| | CGGCTCCACCCGGGCCCGCGCCCTAG | |
| NR_003287.2_RNA28S5_r1.2_26 | /5Biosg/AGGCCATCGCCCGTCCCTTCGGAACGGCGCTCGCCCATCTCTC | 0.566666667 |
| (SEQ ID NO: 294) | AGGACCGACTGACCCATGTTCAACTGCTGTTCACATGGAACCCTTCTCCAC | |
| | TTCGGCCTTCAAAGTTCTCGTTTGAA | |
| NR_003287.2_RNA28S5_r1.2_27 | /5Biosg/CCGCCACTCCGGATTCGGGGATCTGAACCCGACTCCCTTTCGA | 0.666666667 |
| (SEQ ID NO: 295) | TCGGCCGAGGGCAACGGAGGCCATCGCCCGTCCCTTCGGAACGGCGCTCGC | |
| | CCATCTCTCAGGACCGACTGACCCAT | |
| NR_003287.2_RNA28S5_r1.2_28 | /5Biosg/CCCGCCGGCTTCTCCGGGATCGGTCGCGTTACCGCACTGGACG | 0.7 |
| (SEQ ID NO: 296) | CCTCGCGGCGCCCATCTCCGCCACTCCGGATTCGGGGATCTGAACCCGACT | |
| | CCCTTTCGATCGGCCGAGGGCAACGG | |
| NR_003287.2_RNA28S5_r1.2_29 | /5Biosg/GGCGAACCCATTCCAGGGCGCCCTGCCCTTCACAAAGAAAAGA | 0.675 |
| (SEQ ID NO: 297) | GAACTCTCCCCGGGGCTCCCGCCGGCTTCTCCGGGATCGGTCGCGTTACCG | |
| | CACTGGACGCCTCGCGGCGCCCATCT | |
| NR_003287.2_RNA28S5_r1.2_30 | /5Biosg/AGAGCTCACCGGACGCCGCCGGAACCGCCACGCTTTCCAAGGC | 0.666666667 |
| (SEQ ID NO: 298) | ACGGGCCCCTCTCTCGGGGCGAACCCATTCCAGGGCGCCCTGCCCTTCACA | |
| | AAGAAAAGAGAACTCTCCCCGGGGCT | |
| NR_003287.2_RNA28S5_r1.2_31 | /5Biosg/ATATGGGTACGGCCCGGCGCGAGATTTACACCCTCTCCCCCGG | 0.666666667 |
| (SEQ ID NO: 299) | ATTTTCAAGGGCCAGCGAGAGCTCACCGGACGCCGCCGGAACCGCGACGCT | |
| | TTCCAAGGCACGGGCCCCTCTCTCGG | |
| NR_003287.2_RNA28S5_r1.2_32 | /5Biosg/TTCCCTTACCTACATTGTTCCAACATGCCAGAGGCTGTTCACC | 0.575 |
| (SEQ ID NO: 300) | TTGGAGTCCTGCTGCGGATATGGGTACGGCCCGGCGCGAGATTTACACCCT | |
| | CTCCCCCGGATTTTCAAGGGCCAGCG | |
| NR_003287.2_RNA28S5_r1.2_33 | /5Biosg/CGACCGACCCAGCCCTTAGAGCCAATCCTTATCCCGAAGTTAC | 0.566666667 |
| (SEQ ID NO: 301) | GGATCCGGCTTGCCGACTTCCCTTACCTACATTGTTCCAACATGCCAGAGG | |
| | CTGTTCACCTTGGAGACCTGCTGCGG | |
| NR_003287.2_RNA28S5_r1.2_34 | /5Biosg/GGGGGCGGCGGCGCCTCGTCCAGCCGCGGCGCGCGCCCAGCCC | 0.741666667 |
| (SEQ ID NO: 302) | CGCTTCGCGCCCCAGCCCGACCGACCCAGCCCTTAGAGCCAATCCTTATCC | |
| | CGAAGTTACGGATCCGGCTTGCCGAC | |
| NR_003287.2_RNA28S5_r1.2_35 | /5Biosg/CGAGCGGCGCGCGCGGGGTGGGGCGGGGGAGGGCCGCGAGGGG | 0.891666667 |
| (SEQ ID NO: 303) | GGTGCCCCGGGCGTGGGGGGGGCGGCGGCGCCTCGTCCAGCCGCGGCGCGC | |
| | GCCCAGCCCCGCTTCGCGCCCCAGCC | |
| NR_003287.2_RNA28S5_r1.2_36 | /5Biosg/AGGGGGGAGGACGGGGAGCGGGGGAGAGAGAGAGAGAGAGGGC | 0.833333333 |
| (SEQ ID NO: 304) | GCGGGGCGGGGAGGGAGCGAGCGGCGCGCGCGGGGTGGGGCGGGGGAGGGC | |
| | CGCGAGGGGGGTGCCCCGGGCGTGGG | |
| NR_003287.2_RNA28S5_r1.2_37 | /5Biosg/GCCCCTGCCGCCCCGACCCTTCTCCCCCCGCCGCCGCCCCCAC | 0.825 |
| (SEQ ID NO: 305) | GCGGCGCTCCCCCGGGGAGGGGGGAGGACGGGGAGCGGGGGAGAGAGAGAG | |
| | AGAGAGGGCGCGGGGCGGGGAGGGAG | |
| NR_003287.2_RNA28S5_r1.2_38 | /5Biosg/GGGCCCCCCTCGCGGGGGACCGTGCCCCCGCCGCCGGGGCCCC | 0.916666667 |
| (SEQ ID NO: 306) | GCGGCGGGCCGCCGCCGGCCCCTGCCGCCCCGACCCTTCTCCCCCCGCCGC | |
| | CGCCCCCACGCGGCGCTCCCCCGGGG | |
| NR_003287.2_RNA28S5_r1.2_39 | /5Biosg/CCACGGGAAGGGCCCGGCTCGCGTCCAGAGTCGCCGCCGCCGC | 0.9 |
| (SEQ ID NO: 307) | CGGCCCCCCGGGTGCCCGGGCCCCCCTCGCGGGGGACCGTGCCCCCGCCGC | |
| | CGGGGCCCCGCGGCGGGCCGCCGCCG | |
| NR_003287.2_RNA28S5_r1.2_40 | /5Biosg/GCGCCGGCGCCCGCCGGGCTCCCCGGGGGCGGCCGCGACGCCC | 0.875 |
| (SEQ ID NO: 308) | GCCGCAGCTGGGGCGATCCACGGGAAGGGCCCGGCTCGCGTCCAGAGTCGC | |
| | CGCCGCCGCCGGCCCCCCGGGTGCCC | |
| NR_003287.2_RNA28S5_r1.2_41 | /5Biosg/CGACCGCTCCCCGCCCCCAGCGGACGCGCGCGCGACGAGACGT | 0.875 |
| (SEQ ID NO: 309) | GGGGTGGGGGGGGGGGCGCGCCGGCGCCCGCCGGGCTCCCCGGGGGCGGCC | |
| | GCGACGCCCGCCGCAGCTGGGGCGAT | |
| NR_003287.2_RNA28S5_r1.2_42 | /5Biosg/CGGGGGGGTAGGGCGGGGGGACGAACCGCCCCGCCCCGCCGCC | 0.875 |
| (SEQ ID NO: 310) | CGCCGACCGCCGCCGCCCGACCGCTCCCAGCCCCCAGCGGACGCGCGCGCG | |
| | ACGAGACGTGGGGTGGGGGGGGGGGC | |
| NR_003287.2_RNA28S5_r1.2_43 | /5Biosg/CGCCTGCCGCCGCCGCCGCCGCGCGCCGAGGAGGAGGGGGGAA | 0.891666667 |
| (SEQ ID NO: 311) | CGGGGGGCGGACGGGGCCGGGGGGGTAGGGCGGGGGGACGAACCGCCCCGC | |
| | CCCGCCGCCCGCCGACCGCCGCCGCC | |
| NR_003287.2_RNA28S5_r1.2_44 | /5Biosg/CGCGGAACCGCGGCCCCGGGGGCGGACCCGGCGGGGGGGACCG | 0.9 |
| (SEQ ID NO: 312) | GCCCGCGGCCCCTCCGCCGCCTGCCGCCGCCGCCGCCGCGCGCCGAGGAGG | |
| | AGGGGGGAACGGGGGGCGGACGGGGC | |
| NR_003287.2_RNA28S5_r1.2_45 | /5Biosg/TTCCCCTGGTCCGCACCAGTTCTAAGTCGGCTGCTAGGCGCCG | 0.816666667 |
| (SEQ ID NO: 313) | GCCGAGGCGAGGCGCCGCGCGGAACCGCGGCCCCGGGGGCGGACCCGGCGG | |
| | GGGGGACCGGCCCGCGGCCCCTCCGC | |
| NR_003287.2_RNA28S5_r1.2_46 | /5Biosg/ACATCGCGTCAACACCCGCCGCGGGCCTTCGCGATGCTTTGTT | 0.625 |
| (SEQ ID NO: 314) | TTAATTAAACAGTCGGATTCCCCTGGTCCGCACCAGTTCTAAGTCGGCTGC | |
| | TAGGCGCCGGCCGAGGCGAGGCGCCG | |
| NR_003287.2_RNA28S5_r1.2_47 | /5Biosg/CGTTTACCCGCGCTTCATTGAATTTCTTCACTTTGACATTCAG | 0.491666667 |
| (SEQ ID NO: 315) | AGCACTGGGCAGAAATCACATCGCGTCAACACCCGCCGCGGGCCTTCGCGA | |
| | TGCTTTGTTTTAATTAAACAGTCGGA | |
| NR_003287.2_RNA28S5_r1.2_48 | /5Biosg/GCGTCACTAATTAGATGACGAGGCATTTGGCTACCTTAAGAGA | 0.458333333 |
| (SEQ ID NO: 316) | GTCATAGTTACTCCCGCCGTTTACCCGCGCTTCATTGAATTTCTTCACTTT | |
| | GACATTCAGAGCACTGGGCAGAAATC | |
| NR_003287.2_RNA28S5_r1.2_49 | /5Biosg/GGCTGTGGTTTCGCTGGATAGTAGGTAGGGACAGTGGGAATCT | 0.491666667 |
| (SEQ ID NO: 317) | CGTTCATCCATTCATGCGCGTCACTAATTAGATGACGAGGCATTTGGCTAC | |
| | CTTAAGAGAGTCATAGTTACTCCCGC | |
| NR_003287.2_RNA28S5_r1.2_50 | /5Biosg/ACTAGAGTCAAGCTCAACAGGGTCTTCTTTCCCCGCTGATTCC | 0.533333333 |
| (SEQ ID NO: 318) | GCCAAGCCCGTTCCCTTGGCTGTGGTTTCGCTGGATAGTAGGTAGGGACAG | |
| | TGGGAATCTCGTTCATCCATTCATGC | |
| NR_003287.2_RNA28S5_r1.2_51 | /5Biosg/GGGGGGGCGCCGGGGGCCTCCCACTTATTCTACACCTCTCATG | 0.6 |
| (SEQ ID NO: 319) | TCTCTTCACCGTGCCAGACTAGAGTCAAGCTCAACAGGGTCTTCTTTCCCC | |
| | GCTGATTCCGCCAAGCCCGTTCCCTT | |
| NR_003287.2_RNA28S5_r1.2_52 | /5Biosg/TATTTCACCGGCGGCCCGCAGGGCCGGCGGACCCCGCCCCGGG | 0.733333333 |
| (SEQ ID NO: 320) | CCCCTCGCGGGGACACCGGGGGGGCGCCGGGGGCCTCCCACTTATTCTACA | |
| | CCTCTCATGTCTCTTCACCGTGCCAG | |
| NR_003287.2_RNA28S5_r1.2_53 | /5Biosg/GCCCCTCGGGGCTCGCCCCCCCGCCTCACCGGGTCAGTGAAAA | 0.741666667 |
| (SEQ ID NO: 321) | AACGATCAGAGTAGTGGTATTTCACCGGCGGCCCGCAGGGCCGGCGGACCC | |
| | CGCCCCGGGCCCCTCGCGGGGACACC | |
| NR_003287.2_RNA28S5_r1.2_54 | /5Biosg/TCCCCGGAGCGGGTCGCGCCCGGCCGGCGCGCGGCCGGGCGCT | 0.75 |
| (SEQ ID NO: 322) | TGGCGCCAGAAGCGAGAGCCCCTCGGGGCTCGCCCCCCCGCCTCACCGGGT | |
| | CAGTGAAAAAACGATCAGAGTAGTGG | |
| NR_003287.2_RNA28S5_r1.2_55 | /5Biosg/GACACCTGCGTTACCGTTTGACAGGTGTACCGCCCCAGTCAAA | 0.716666667 |
| (SEQ ID NO: 323) | CTCCCCACCTGGCACTGTCCCCGGAGCGGGTCGCGCCCGGCCGGCGCGCGG | |
| | CCGGGCGCTTGGCGCCAGAAGCGAGA | |
| NR_003287.2_RNA28S5_r1.2_56 | /5Biosg/AAGCGAGCTTTTGCCCTTCTGCTCCACGGGAGGTTTCTGTCCT | 0.591666667 |
| (SEQ ID NO: 324) | CCCTGAGCTCGCCTTAGGACACCTGCGTTACCGTGTTGACAGGTGTACCGC | |
| | CCCATCAAACTCCCCACCTGGCACTG | |
| NR_003287.2_RNA28S5_r1.2_57 | /5Biosg/GGTCAGAAGGATCGTGAGGCCCCGCTTTCACGGTCTGTATTCG | 0.541666667 |
| (SEQ ID NO: 325) | TACTGAAAATCAAGATCAAGCGAGCTTTTGCCCTTCTGCTCCACGGGAGGT | |
| | TTCTGTCCTCCCTGAGCTCGCCTTAG | |
| NR_003287.2_RNA28S5_r1.2_58 | /5Biosg/CGCCACAAGCCAGTTATCCCTGTGGTAACTTTTCTGACACCTC | 0.483333333 |
| (SEQ ID NO: 326) | CTGCTTAAAACCCAAAAGGTCAGAAGGATCGTGAGGCCCCGCTTTCACGGT | |
| | CTGTATTCGTACTGAAAATCAAGATC | |
| NR_003287.2_RNA28S5_r1.2_59 | /5Biosg/CAATGATAGGAAGAGCCGACATCGAAGGATCAAAAAGCGACGT | 0.483333333 |
| (SEQ ID NO: 327) | CGCTATGAACGCTTGGCCGCCACAAGCCAGTTATCCCTGTGGTAACTTTTC | |
| | TGACACCTCCTGCTTAAAACCCAAAA | |
| NR_003287.2_RNA28S5_r1.2_60 | /5Biosg/ACCaAGCTCACGTTCCCTATTAGTGGGTGAACAATCCAACGCT | 0.491666667 |
| (SEQ ID NO: 328) | TGGTGAATTCTGCTTCACAATGATAGGAAGAGCCGACATCGAAGGATCAAA | |
| | AAGCGACGTCGCTATGAACGCTTGGC | |
| NR_003287.2_RNA28S5_r1.2_61 | /5Biosg/TTACCATGGCAACAACACATCATCAGTAGGGTALAACTAACCT | 0.458333333 |
| (SEQ ID NO: 329) | GTCTCACGACGGTCTAAACCCAGCTCACGTTCCCTATTAGTGGGTGAACAA | |
| | TCCAACGCTTGGTGAATTCTGCTTCA | |
| NR_003287.2_RNA28S5_r1.2_62 | /5Biosg/CCTCAGCCAAGCACATACACCAAATGTCTGAACCTGCGGTTCC | 0.483333333 |
| (SEQ ID NO: 330) | TCTCGTACTGAGCAGGATTACCATGGCAACAACACATCATCAGTAGGGTAA | |
| | AACTAACCTGTCTCACGACGGTCTAA | |
| NR_003287.2_RNA28S5_r1.2_63 | /5Biosg/GATTCTGACTTAGAGGCGTTCAGTCATAATCCCACAGATGGTA | 0.516666667 |
| (SEQ ID NO: 331) | GCTTCGCCCCATTGGCTCCTCAGCCAAGCACATACACCAAATGTCTGAACC | |
| | TGCGGTTCCTCTCGTACTGAGCAGGA | |
| NR_003287.2_RNA28S5_r1.2_64 | /5Biosg/ACCGGCTATCCGAGGCCAACCGAGGCTCCGCGGCGCTGCCGTA | 0.616666667 |
| (SEQ ID NO: 332) | TCGTTCCGCCTGGGCGGGATTCTGACTTAGAGGCGTTCAGTCATAATCCCA | |
| | CAGATGGTAGCTTCGCCCCATTGGCT | |
| NR_003287.2_RNA28S5_r1.2_65 | /5Biosg/TCCCGCGCGCGCGGGGCGCGTGGAGGGGGGGGGCGGCCCGCCG | 0.825 |
| (SEQ ID NO: 333) | GCGGGGACAGGCGGGGGACCGGCTATCCGAGGCCAACCGAGGCTCCGCGGC | |
| | GCTGCCGTATCGTTCCGCCTGGGCGG | |
| NR_003287.2_RNA28S5_r1.2_66 | /5Biosg/CCAGGACGAAGGGCACTCCGCACCGGACCCCGGTCCCGGCGCG | 0.875 |
| (SEQ ID NO: 334) | CGGCGGGGCACGCGCCCTCCCGCGCGCGCGGGGCGCGTGGAGGGGGGGGGC | |
| | GGCCCGCCGGCGGGGACAGGCGGGGG | |
| NR_003287.2_RNA28S5_r1.2_67 | /5Biosg/ACGAACGTGCGGTGCGTGACGGGCGAGGGGGCGGCCGCCTCTC | 0.808333333 |
| (SEQ ID NO: 335) | CGGCCGCGCCCCGTTTCCCAGGACGAAGGGCACTCCGCACCGGACCCCGGT | |
| | CCCGGCGCGCGGCGGGGCACGCGCCC | |
| NR_003287.2_RNA28S5_r1.2_68 | /5Biosg/ACGTACGAAACCCCGACCCAGAAGCAGGTCGTCTACGAATGGT | 0.683333333 |
| (SEQ ID NO: 336) | TTAGCGCCAGGTTCCCCACGAACGTGCGGTGCGTGACGGGCGAGGGGGCGG | |
| | CCGCCTCTCCGGCCGCGCCCCGTTTC | |
| NR_003287.2_RNA28S5_r1.2_69 | /5Biosg/GACAAACCCTTGTGTCGAGGGCTGACTTTCAATAGATCGCAGC | 0.566666667 |
| (SEQ ID NO: 337) | GAGGGAGCTGCTCTGCTACGTACGAAACCCCGACCCAGAAGCAGGTCGTCT | |
| | ACGAATGGTTTAGCGCCAGGTTCCCC | |
| 5SrRNA_X71801_r1_1 | /5Biosg/CTTCCACCACATCGGGCCCGCTCGGAGCAGGGAGTGCTCCGAG | 0.716666667 |
| (SEQ ID NO: 336) | GCGTCAGGGCCCAGGGCCCACGATCCTGGGACGCCCTCCGGTCCTCCGCCC | |
| | TGTCGCGGAGGCAGCGTTTTGGATCC | |
| 5SrRNA_X71801_r1_2 | /5Biosg/GATCGGGGACCCCCGAGCCGCTGGCCCGCGGCCTTCCCCCGGC | 0.783333333 |
| (SEQ ID NO: 339) | TCCCGCGCTCCCGAGCTTCCACCACATCGGGCCCGCTCGGAGCAGGGAGTG | |
| | CTCCGAGGCGTCAGGGCCCAGGGCCC | |
| 5SrRNA_X71801_r1_3 | /5Biosg/GCCCGGCCGTGCCCGCCGGATTGCAGCCGACACCGCCAGCCCG | 0.825 |
| (SEQ ID NO: 340) | GGGCCGCGGGGCTCGGATCGGGGACCCCCGAGCCGCTGGCCCGCGGCCTTC | |
| | CCCCGGCTCCCGCGCTCCCGAGCTTC | |
| 5SrRNA_X71801_r1_4 | /5Biosg/GGTGGTATGGCCGTAGACGCTGAAGGAGGCGCCTGGCTGCCCC | 0.766666667 |
| (SEQ ID NO: 341) | AAGAGCCCAGCCCCGCCCGGCCGTGCCCGCCGGATTGCAGCCGACACCGCC | |
| | AGCCCGGGGCCGCGGGGCTCGGATCG | |
| 5SrRNA_X71801_r1_5 | /5Biosg/ACTAACCAGGCCCGACCCTGCTTAGCTTCCGAGATCAGACGAG | 0.666666667 |
| (SEQ ID NO: 342) | ATCGGGCGCGTTCAGGGTGGTATGGCCGTAGACGCTGAAGGAGGCGCCTGG | |
| | CTGCCCCAAGAGCCCAGCCCCGCCCG | |
| 5SrRNA_X71801_r1_6 | /5Biosg/AAAAGCCAAAGAAAAAGCCTACAGCACCCGGTATTCCCAGGCG | 0.566666667 |
| (SEQ ID NO: 343) | GTCTCCCATCCAAGTACTAACCAGGCCCGACCCTGCTTAGCTTCCGAGATC | |
| | AGACGAGATCGGGCGCGTTCAGGGTG | |
| 5SrRNA_X71801_r1_7 | /5Biosg/CACTCCAGCCTGGGCGACAGGGCGAGACTCCGTCTGGAAGAAA | 0.533333333 |
| (SEQ ID NO: 344) | AGGAAAGAAACAGCAAAAAGCCAAAGAAAAAGCCTACAGCACCCGGTATTC | |
| | CCAGGCGGTCTCCCATCCAAGTACTA | |
| 5SrRNA_X71801_r1_8 | /5Biosg/GGGGAATGGCGTGGACCCGGGAGGCGGAGCTTGCACTGAGCCG | 0.625 |
| (SEQ ID NO: 345) | AGATGGCGCCACCGCACTCCAGCCTGGGCGACAGGGCGAGACTCCGTCTGG | |
| | AAGATAAGGAAAGAAACAGCTAAAAG | |
| 5SrRNA_X71801_r1_9 | /5Biosg/AAGTAGCCGGGCGTGGTGGCGGGCGCCTGTAGGCCCAGCTACT | 0.716666667 |
| (SEQ ID NO: 346) | CGGGAGGCTGAGGCCGGGGAATGGCGTGGACCCGGGAGGCGGAGCTTGCAG | |
| | TGAGCCGAGATGGCGCCACCGCACTC | |
| 5SrRNA_X71801_r1_10 | /5Biosg/GAGCTCCAGACCATCCCGGCTAACAGGGTGAAAGCCCGTCTCT | 0.633333333 |
| (SEQ ID NO: 347) | AGGAAAAATAGAACATAGTAGCCGGGCGTGGTGGCGGGCGCCTGTAGGCCC | |
| | AGCTACTCGGGAGGCTGAGGCCGGGG | |
| RNA5-8S5_NR_003285_r1_1 | /5Biosg/CCGGGGCCGCTAGTGCGTTCGAAGTGTCGATGATCAATGTGTC | 0.541666667 |
| (SEQ ID NO: 348) | CTGCAATTCACATTAATTCTCGCACCTAGCTGCGTTCTTCATCGACGCACG | |
| | AGCCGAGTGATCCACCGCTAAGAGTC | |
| RNA5-8S5_NR_003285_r1_2 | /5Biosg/AAGCGACGCTCAGACAGGCGTAGCCCCGGGAGGAACCCGGGGC | 0.558333333 |
| (SEQ ID NO: 349) | CGCAAGTGCGTTCGAAGTGTCGATGATCAATGTGTCCTGCAATTCACATTA | |
| | ATTCTCGCAGCTAGCTGCGTTCTTCA | |

APPENDIX 5
120-mer DNA rRNA Capture Probes/Baits at 2x coverage, 85% GC restriction (Note: /5Biosg/ = 5′-biotin)

| Name | Sequence | GC content |
|---|---|---|
| KF899911.1_12SrRNA_r1_1 | /5Biosg/GCGTGCTTGATGCTTGTCCCTTTTGATCGTGGTGATTTAGAGGGTGAACTCACTGG | 0.45 |
| (SEQ ID NO: 349) | AACGGGGATGCTTGCATGTGTAATCTTACTAAGAGCTAATAGAAAGGCTAGGACCAAACCTATT | |
| KF899911.1_12SrRNA_r1_2 | /5Biosg/TTAATCACTGCTGTTTCCCGTGGGGGTGTGGCTAGGCTAAGCGTTTTGAGCTGCAT | 0.508333333 |
| (SEQ ID NO: 350) | TGCTGCGTGCTTGATGCTTGTCCCTTTTGATCGTGGTGATTTAGAGGGTGAACTCACTGGAACG | |
| KF899911.1_12SrRNA_r1_3 | /5Biosg/GAAATTGACCAACCCTGGGGTTAGTATAGCTTAGTTAAACTTTCGTTTATTGCTAA | 0.45 |
| (SEQ ID NO: 351) | AGGTTAATCACTGCTGTTTCCCGTGGGGGTGTGGCTAGGCTAAGCGTTTTGAGCTGCATTGCTG | |
| KF899911.1_12SrRNA_r1_4 | /5Biosg/ACACTCTTTACGCCGGCTTCTATTGACTTGGGTTAATCGTGTGACCGCGGTGGCTG | 0.458333333 |
| (SEQ ID NO: 352) | GCACGAAATTGACCAACCCTGGGGTTAGTATAGCTTAGTTAAACTTTCGTTTATTGCTAAAGGT | |
| KF899911.1_12SrRNA_r1_5 | /5Biosg/ACTGGAGTTTTTTACAACTCAGGTGAGTTTTAGCTTTATTGGGGAGGGGGTGATCT | 0.483333333 |
| (SEQ ID NO: 353) | AAAACACTCTTTACGCCGGCTTCTATTGACTTGGGTTAATCGTGTGACCGCGGTGGCTGGCACG | |
| KF899911.1_12SrRNA_r1_6 | /5Biosg/GGTCTTAGCTATTGTGTGTTCAGATATGTTAAAGCCACTTTCGTAGTCTATTTTGT | 0.383333333 |
| (SEQ ID NO: 354) | GTCAACTGGAGTTTTTTACAACTCAGGTGAGTTTTAGCTTTATTGGGGAGGGGGTGATCTAAAA | |
| KF899911.1_12SrRNA_r1_7 | /5Biosg/TGTTGATTTAACTGTTGAGGTTTAGGGCTAAGCATAGTGGGGTATCTAATCCCAGT | 0.383333333 |
| (SEQ ID NO: 355) | TTGGGTCTTAGCTATTGTGTGTTCAGATATGTTAAAGCCACTTTCGTAGTCTATTTTGTGTCAA | |
| KF899911.1_12SrRNA_r1_8 | /5Biosg/AAGCACCGCCAGGTCCTTTGAGTTTTAAGCTGTGGCTCGTAGTGTTCTGGCGAGCA | 0.466666667 |
| (SEQ ID NO: 356) | GTTTTGTTGATTTAACTGTTGAGGTTTAGGGCTAAGCATAGTGGGGTATCTAATCCCAGTTTGG | |
| KF899911.1_12SrRNA_r1_9 | /5Biosg/GAGGTGGTGAGGTTGATCGGGGTTTATCGATTACAGAACAGGCTCCTCTAGAGGGA | 0.508333333 |
| (SEQ ID NO: 356) | TATGAAGCACCGCCAGGTCCTTTGAGTTTTAAGCTGTGGCTCGTAGTGTTCTGGCGAGCAGTTT | |
| KF899911.1_12SrRNA_r1_10 | /5Biosg/CGCTTACTTTGTAGCCTTCATCAGGGTTTGCTGAAGATGGCGGTATATAGGCTGAG | 0.483333333 |
| (SEQ ID NO: 357) | CAAGAGGTGGTGAGGTTGATCGGGGTTTATCGATTACAGAACAGGCTCCTCTAGAGGGATATGA | |
| KF899911.1_12SrRNA_r1_11 | /5Biosg/GCCCATTTCTTGCCACCTCATGGGCTACACCTTGACCTAACGTCTTTACGTGGGTA | 0.5 |
| (SEQ ID NO: 358) | CTTGCGCTTACTTTGTAGCCTTCATCAGGGTTTGCTGAAGATGGCGGTATATAGGCTGAGCAAG | |
| KF899911.1_12SrRNA_r1_12 | /5Biosg/CCACCTTCGACCCTTAAGTTTCATAAGGGCTATCGTAGTTTTCTGGGGTAGAAAAT | 0.475 |
| (SEQ ID NO: 359) | GTAGCCCATTTCTTGCCACCTCATGGGCTACACCTTGACCTAACGTCTTTACGTGGGTACTTGC | |
| KF899911.1_12SrRNA_r1_13 | /5Biosg/TGTGTACGCGCTTCAGGGCCCTGTTCAACTAAGCACTCTACTCTCAGTTTACTGCT | 0.45 |
| (SEQ ID NO: 360) | AAATCCACCTTCGACCCTTAAGTTTCATAAGGGCTATCGTAGTTTTCTGGGGTAGAAAATGTAG | |
| KF899911.1_12SrRNA_r1_14 | /5Biosg/ATGCGTAGGGGTTTTAGTTAAATGTCCTTTGAAGTATACTTGAGGAGGGTGACGGG | 0.475 |
| (SEQ ID NO: 361) | CGGTGTGTACGCGCTTCAGGGCCCTGTTCAACTAAGCACTCTACTCTCAGTTTACTGCTAAATC | |
| KF899911.1_12SrRNA_r1_15 | /5Biosg/GTTCGTCCAAGTGCACTTTCCAGTACACTTACCATGTTACGACTTGTCTCCTCTAT | 0.441666667 |
| (SEQ ID NO: 362) | ATAAATGCGTAGGGGTTTTAGTTAAATGTCCTTTGAAGTATACTTGAGGAGGGTGACGGGCGGT | |
| KF899911.1_16SrRNA_r1_1 | /5Biosg/TTGCGGTACTATATCTATTGCGCCAGGTTTCAATTTCTATCGCCTATACTTTATTT | 0.425 |
| (SEQ ID NO: 363) | GGGTAAATGGTTTGGTTAAGGTTGTCTGGTAGTAAGGTGGAGTGGGTTTGGGGCTAGGTTTAGC | |
| KF899911.1_16SrRNA_r1_2 | /5Biosg/AGAAGGTATAGGGGTTAGTCCTTGCTATATTATGCTTGGTTATAATTTTTCATCTT | 0.366666667 |
| (SEQ ID NO: 364) | TCCCTTGCGGTACTATATCTATTGCGCCAGGTTTCAATTTCTATCGCCTATACTTTATTTGGGT | |
| KF899911.1_16SrRNA_r1_3 | /5Biosg/GTTTCGGGGGTCTTAGCTTTGGCTCTCCTTGCAAAGTTATTTCTAGTTAATTCATT | 0.375 |
| (SEQ ID NO: 365) | ATGCAGAAGGTATAGGGGTTAGTCCTTGCTATATTATGCTTGGTTATAATTTTTCATCTTTCCC | |
| KF899911.1_16SrRNA_r1_4 | /5Biosg/CCCACTATTTTGCTACATAGACGGGTGTGCTCTTTTAGCTGTTCTTAGGTAGCTCG | 0.433333333 |
| (SEQ ID NO: 366) | TCTGGTTTCGGGGGTCTTAGCTTTGGCTCTCCTTGCAAAGTTATTTCTAGTTAATTCATTATGC | |
| KF899911.1_16SrRNA_r1_5 | /5Biosg/ATCTTGGACAACCAGCTATCACCAGGCTCGGTAGGTTTGTCGCCTCTACCTATAAA | 0.466666667 |
| (SEQ ID NO: 367) | TCTTCCCACTATTTTGCTACATAGACGGGTGTGCTCTTTTAGCTGTTCTTAGGTAGCTCGTCTG | |
| KF899911.1_16SrRNA_r1_6 | /5Biosg/TAAATTTACAAGGGGATTTAGAGGGTTCTGTGGGCAAATTTAAAGTTGAACTAAGA | 0.4 |
| (SEQ ID NO: 368) | TTCTATCTTGGACAACCAGCTATCACCAGGCTCGGTAGGTTTGTCGCCTCTACCTATAAATCTT | |
| KF899911.1_16SrRNA_r1_7 | /5Biosg/CTCTCTCTACAAGGTTTTTTCCTAGTGTCCAAAGAGCTGTTCCTCTTTGGACTAAC | 0.375 |
| (SEQ ID NO: 369) | AGTTAAATTTACAAGGGGATTTAGAGGGTTCTGTGGGCAAATTTAAAGTTGAACTAAGATTCTA | |
| KF899911.1_16SrRNA_r1_8 | /5Biosg/CTTGAACGCTTTCTTAATTGGTGGCTGCTTTTAGGCCTACTATGGGTGTTAAATTT | 0.391666667 |
| (SEQ ID NO: 370) | TTTACTCTCTCTACAAGGTTTTTTCCTAGTGTCCAAAGAGCTGTTCCTCTTTGGACTAACAGTT | |
| KF899911.1_16SrRNA_r1_9 | /5Biosg/CCAATTGGGTGTGAGGAGTTCAGTTATATGTTTGGGATTTTTTAGGTAGTGGGTGT | 0.391666667 |
| (SEQ ID NO: 371) | TGAGCTTGAACGCTTTCTTAATTGGTGGCTGCTTTTAGGCCTACTATGGGTGTTAAATTTTTTA | |
| KF899911.1_16SrRNA_r1_10 | /5Biosg/GGAGAATGTTTTCATGTTACTTATACTAACATTAGTTCTTCTATAGGGTGATAGAT | 0.366666667 |
| (SEQ ID NO: 372) | TGGTCCAATTGGGTGTGAGGAGTTCAGTTATATGTTTGGGATTTTTTAGGTAGTGGGTGTTGAG | |
| KF899911.1_16SrRNA_r1_11 | /5Biosg/GTAGATATTGGGCTGTTAATTGTCAGTTCAGTGTTTTAATCTGACGCAGGCTTATG | 0.366666667 |
| (SEQ ID NO: 373) | CGGAGGAGAATGTTTTCATGTTACTTATACTAACATTAGTTCTTCTATAGGGTGATAGATTGGT | |
| KF899911.1_16SrRNA_r1_12 | /5Biosg/CCTTATGAGCATGCCTGTGTTGGGTTGACAGTGAGGGTAATAATGACTTGTTGGTT | 0.425 |
| (SEQ ID NO: 374) | GATTGTAGATATTGGGCTGTTAATTGTCAGTTCAGTGTTTTAATCTGACGCAGGCTTATGCGGA | |
| KF899911.1_16SrRNA_r1_13 | /5Biosg/TGTTTTTGGTAAACAGGCGGGGTAAGATTTGCCGAGTTCCTTTTACTTTTTTTAAC | 0.4 |
| (SEQ ID NO: 375) | CTTTCCTTATGAGCATGCCTGTGTTGGGTTGACAGTGAGGGTAATAATGACTTGTTGGTTGATT | |
| KF899911.1_16SrRNA_r1_14 | /5Biosg/GCCGTTAAACATGTGTCACTGGGCAGGCGGTGCCTCTAATACTGGTGATGCTAGAG | 0.45 |
| (SEQ ID NO: 376) | GTGATGTTTTTGGTAAACAGGCGGGGTAAGATTTGCCGAGTTCCTTTTACTTTTTTTAACCTTT | |
| KF899911.1_16SrRNA_r1_15 | /5Biosg/TACAGGTCCCTATTTAAGGAACAAGTGATTATGCTACCTTTGCACGGTTAGGGTAC | 0.5 |
| (SEQ ID NO: 377) | CGCGGCCGTTAAACATGTGTCACTGGGCAGGCGGTGCCTCTAATACTGGTGATGCTAGACGTGA | |
| KF899911.1_16SrRNA_r1_16 | /5Biosg/GGGCAGGTCAATTTCACTGGTTAAAAGTAAGAGACAGCTGAACCCTCGTGGAGCCA | 0.475 |
| (SEQ ID NO: 378) | TTCATACAGGTCCCTATTTAAGGAACAAGTGATTATGCTACCTTTGCACGGTTAGGGTACCGCG | |
| KF899911.1_16SrRNA_r1_17 | /5Biosg/TTAATAAATTAAAGCTCCATAGGGTCTTCTCGTCTTGCTGTGTCATGCCCGCCTCT | 0.466666667 |
| (SEQ ID NO: 379) | TCACGGGCAGGTCAATTTCACTGGTTAAAAGTAAGAGACAGCTGAACCCTCGTGGAGCCATTCA | |
| KF899911.1_16SrRNA_r1_18 | /5Biosg/GAAATTTTTAATGCAGGTTTGGTAGTTTAGGACCTGTGGGTTTGTTAGGTACTGTT | 0.416666667 |
| (SEQ ID NO: 380) | TGCATTAATAAATTAAAGCTCCATAGGGTCTTCTCGTCTTGCTGTGTCATGCCCGCCTCTTCAC | |
| KF899911.1_16SrRNA_r1_19 | /5Biosg/GGTGAAGTCTTAGCATGTACTGCTCGGAGGTTGGGTTCTGCTCCGAGGTCGCCCCA | 0.483333333 |
| (SEQ ID NO: 381) | ACCGAAATTTTTAATGCAGGTTTGGTACTTTAGGACCTGTGGGTTTGTTAGGTACTGTTTGCAT | |
| KF899911.1_16SrRNA_r1_20 | /5Biosg/GGTAACTTGTTCCGTTGGTCAAGTTATTGGATCAATTGAGTATAGTAGTTCGCTTT | 0.491666667 |
| (SEQ ID NO: 382) | GACTGGTGAAGTCTTAGCATGTACTGCTCGGAGGTTGGGTTCTGCTCPGAGGTCGCCCCAACCG | |
| KF899911.1_16SrRNA_r1_21 | /5Biosg/GAGGTCGTAAACCCTATTGTTGATATGGACTCTAGAATAGGATTGCGCTGTTATCC | 0.408333333 |
| (SEQ ID NO: 383) | CTACGGTAACTTGTTCCGTTGGTCAAGTTATTGGATCAATTGAGTATAGTACTTCGCTTTGACT | |
| KF899911.1_16SrRNA_r1_22 | /5Biosg/TCGTTGAACAAACGAACCTTTAATAGCGGCTGCACCATCGGGATGTCCTGATCCAA | 0.458333333 |
| (SEQ ID NO: 384) | CATCGAGGTCGTAAACCCTATTGTTGATATGGACTCTAGAATAGGATTGCGCTGTTATCCCTAG | |
| KF899911.1_16SrRNA_r1_23 | /5Biosg/AAGTAGATAGAAACCGACCTGGATTACTCCGGTCTGAACTCAGATCACGTAGGACT | 0.458333333 |
| (SEQ ID NO: 385) | TTAATCGTTGAACAAACGAACCTTTAATAGCGGCTGCACCATCGGGATGTCCTGATCCAACATC | |
| KF899911.1_16SrRNA_r1_24 | /5Biosg/GGAAGGCGCTTTGTGAAGTAGGCCTTATTTCTCTTGTCCTTTCGTACAGGGAGGAA | 0.45 |
| (SEQ ID NO: 386) | TTTGAAGTAGATAGAAACCGACCTGGATTACTCCGGTCTGAACTCAGATCACGTAGGACTTTAA | |
| KF899911.1_16SrRNA_r1_25 | /5Biosg/AAACCCTGTTCTTGGGTGGGTGTGGGTATAATACTAAGTTGAGATGATATCATTTA | 0.441666667 |
| (SEQ ID NO: 387) | CGGGGGAAGGCGCTTTGTGAAGTAGGCCTTATTTCTCTTGTCCTTTCGTACAGGGAGGAATTTG | |
| NR_003286.2_RNA18S5_r1_1 | /5Biosg/AAGGAACCATAACTGATTTAATGAGCCATTCGCAGTTTCACTGTACCGGCCGTGCG | 0.458333333 |
| (SEQ ID NO: 388) | TACTCAGACATGCATGGCTTAATCTTTGAGACAAGCATATGCTACTGGCAGGATCAACCAGGTA | |
| NR_003286.2_RNA18S5_r1_2 | /5Biosg/GCATGTATTAGCTCTAGAATTACCACAGTTATCCAAGTAGGAGAGGAGCGAGCGAC | 0.466666667 |
| (SEQ ID NO: 389) | CAAAGGAACCATAACTGATTTAATGAGCCATTCGCAGTTTCACTGTACCGGCCGTGCGTACTCA | |
| NR_003286.2_RNA18S5_r1_3 | /5Biosg/GTTGGTTTTGATCTGATAAATGCACGCATCCCCCCCGCGAAGGGGGTCAGCGCCCG | 0.533333333 |
| (SEQ ID NO: 390) | TCGGCATGTATTAGCTCTAGAATTACCACAGTTATCCAAGTAGGAGAGGAGCGAGCGACCAAAG | |
| NR_003286.2_RNA18S5_r1_4 | /5Biosg/GAGTCACCAAAGCCGCCGGCGCCCGCCCCCCGGCCGGGGCCGGAGAGGGGCTGACC | 0.716666667 |
| (SEQ ID NO: 391) | GGGTTGGTTTTGATCTGATAAATGCACGCATCCCCCCCGCGAAGGGGGTCAGCGCCCGTCGGCA | |
| NR_003286.2_RNA18S5_r1_5 | /5Biosg/GACGTTCGAATGGGTCGTCGCCGCCACGGGGGGCGTGCGATCGGCCCGAGGTTATC | 0.741666667 |
| (SEQ ID NO: 392) | TAGAGTCACCAAAGCCGCCGGCGCCCGCCCCCCGGCCGGGGCCGGAGAGGGGCTGACCGGGTTG | |
| NR_003286.2_RNA18S5_r1_6 | /5Biosg/CCGTCACCCGTGGTCACCATGGTAGGCACGGCGACTACCATCGAAAGTTGATAGGG | 0.625 |
| (SEQ ID NO: 393) | CAGACGTTCGAATGGGTCGTCGCCGCCACGGGGGGCGTGCGATCGGCCCGAGGTTATCTAGAGT | |
| NR_003286.2_RNA18S5_r1_7 | /5Biosg/CTTCCTTGGATGTGGTAGCCGTTTCTCAGGCTCCCTCTCCGGAATCGAACCCTGAT | 0.575 |
| (SEQ ID NO: 394) | TCCCCGTCACCCGTGGTCACCATGGTAGGCACGGCGACTACCATCGAAAGTTGATAGGGCAGAC | |
| NR_003286.2_RNA18S5_r1_8 | /5Biosg/TGTTATTTTTCGTCACTACCTCCCCGGGTCGGGAGTGGGTAATTTGCGCGCCTGCT | 0.575 |
| (SEQ ID NO: 395) | GCCTTCCTTGGATGTGGTAGCCGTTTCTCAGGCTCCCTCTCCGGAATCGAACCCTGATTCCCCG | |
| NR_003286.2_RNA18S5_r1_9 | /5Biosg/CGTTAAAGGATTTAAAGTGGACTCATTCCAATTACAGGGCCTCGAAAGAGTCCTGT | 0.491666667 |
| (SEQ ID NO: 396) | ATTGTTATTTTTCGTCACTACCTCCCCGGGTCGGGAGTGGGTAATTTGCGCGCCTGCTGCCTTC | |
| NR_003286.2_RNA18S5_r1_10 | /5Biosg/GCTATTGGAGCTGGAATTACCGCGGCTGCTGGCACCAGACTTGCCCTCCAATGGAT | 0.491666667 |
| (SEQ ID NO: 397) | CCTCGTTAAAGGATTTAAAGTGGACTCATTCCAATTACAGGGCCTCGAAAGAGTCCTGTATTGT | |
| NR_003286.2_RNA18S5_r1_11 | /5Biosg/GCCCGCCCGCTCCCAAGATCCAACTACGAGCTTTTTAACTGCAGCAACTTTAATAT | 0.533333333 |
| (SEQ ID NO: 398) | ACGCTATTGGAGCTGGAATTACCGCGGCTGCTGGCACCAGACTTGCCCTCCAATGGATCCTCGT | |
| NR_003286.2_RNA18S5_r1_12 | /5Biosg/GAGGGGGCGCCGAGAGGCAAGGGGCGGGGACGGGCGGTGGCTCGCCTCGCGGCGGA | 0.65 |
| (SEQ ID NO: 399) | CCGCCCGCCCGCTCCCAAGATCCAACTACGAGCTTTTTAACTGCAGCAACTTTAATATACGCTA | |
| NR_003286.2_RNA18S5_r1_13 | /5Biosg/ACTCTAATTTTTTCAAAGTAAACGCTTCGGGCCCCGCGGGACACTCAGCTAAGAGC | 0.666666667 |
| (SEQ ID NO: 400) | ATCGAGGGGGCGCCGAGAGGCAAGGGGCGGGGACGGGCGGTGGCTCGCCTCGCGGCGGACCGCC | |
| NR_003286.2_RNA18S5_r1_14 | /5Biosg/CGGTCCTATTCCATTATTCCTAGCTGCGGTATCCAGGCGGCTCGGGCCTGCTTTGA | 0.533333333 |
| (SEQ ID NO: 401) | ACACTCTAATTTTTTCAAAGTAAACGCTTCGGGCCCCGCGGGACACTCAGCTAAGAGCATCGAG | |
| NR_003286.2_RNA18S5_r1_15 | /5Biosg/CCCCCGGCCGTCCCTCTTAATCATGGCCTCAGTTCCGAAAACCAACAAAATAGAAC | 0.55 |
| (SEQ ID NO: 402) | CGCGGTCCTATTCCATTATTCCTAGCTGCGGTATCCAGGCGGCTCGGGCCTGCTTTGAACACTC | |
| NR_003286.2_RNA18S5_r1_16 | /5Biosg/GCTCTGGTCCGTCTTGCGCCGGTCCAAGAATTTCACCTCTAGCGGCGCAATACGAA | 0.558333333 |
| (SEQ ID NO: 403) | TGCCCCCGGCCGTCCCTCTTAATCATGGCCTCAGTTCCGAAAACCAACAAAATAGAACCGCGGT | |
| NR_003286.2_RNA18S5_r1_17 | /5Biosg/GTCTTCGAACCTCCGACTTTCGTTCTTGATTAATGAAAACATTCTTGGCAAATGCT | 0.491666667 |
| (SEQ ID NO: 404) | TTCGCTCTGGTCCGTCTTGCGCCGGTCCAAGAATTTCACCTCTAGCGGCGCAATACGAATGCCC | |
| NR_003286.2_RNA18S5_r1_18 | /5Biosg/ACGCCGCCGCATCGCCGGTCGGCATCGTTTATGGTCGGAACTACGACGGTATCTGA | 0.5 |
| (SEQ ID NO: 405) | TCGTCTTCGAACCTCCGACTTTCGTTCTTGATTAATGAAAACATTCTTGGCAAATGCTTTCGCT | |
| NR_003286.2_RNA18S5_r1_19 | /5Biosg/CCCCCCGGAACCCAAAGACTTTGGTTTCCCGGAAGCTGCCCGGCGGGTCATGGGAA | 0.608333333 |
| (SEQ ID NO: 406) | TAACGCCGCCGCATCGCCGGTCGGCATCGTTTATGGTCGGAACTACGACGGTATCTGATCGTCT | |
| NR_003286.2_RNA18S5_r1_20 | /5Biosg/TCCACTCCTGGTGGTGCCCTTCCGTCAATTCCTTTAAGTTTCAGCTTTGCAACCAT | 0.55 |
| (SEQ ID NO: 407) | ACTCCCCCCGGAACCCAAAGACTTTGGTTTCCCGGAAGCTGCCCGGCGGGTCATGGGAATAACG | |
| NR_003286.2_RNA18S5_r1_21 | /5Biosg/CCTGTCCGTGTCCGGGCCGGGTGAGGTTTCCCGTGTTGAGTCAAATTAAGCCGCAG | 0.558333333 |
| (SEQ ID NO: 408) | GCTCCACTCCTGGTGGTGCCCTTCCGTCAATTCCTTTAAGTTTCAGCTTTGCAACCATACTCCC | |
| NR_003286.2_RNA18S5_r1_22 | /5Biosg/TAAGAACGGCCATGCACCACCACCCACGGAATCGAGAAAGAGCTATCAATCTGTCA | 0.55 |
| (SEQ ID NO: 409) | ATCCTGTCCGTGTCCGGGCCGGGTGAGGTTTCCCGTGTTGAGTCAAATTAAGCCGCAGGCTCCA | |
| NR_003286.2_RNA18S5_r1_23 | /5Biosg/GTTAGCATGCCAGAGTCTCGTTCGTTATCGGAATTAACCAGACAAATCGCTCCACC | 0.483333333 |
| (SEQ ID NO: 410) | AACTAAGAACGGCCATGCACCACCACCCACGGAATCGAGAAAGAGCTATCAATCTGTCAATCCT | |
| NR_003286.2_RNA18S5_r1_24 | /5Biosg/CGCCACTTGTCCCTCTAAGAAGTTGGGGGACGCCGACCGCTCGGGGGTCGCGTAAC | 0.541666667 |
| (SEQ ID NO: 411) | TAGTTAGCATGCCAGAGTCTCGTTCGTTATCGGAATTAACCAGACAAATCGCTCCACCAACTAA | |
| NR_003286.2_RNA18S5_r1_25 | /5Biosg/AGCCCCGGACATCTAAGGGCATCACAGACCTGTTATTGCTCAATCTCGGGTGGCTG | 0.575 |
| (SEQ ID NO: 412) | AACGCCACTTGTCCCTCTAAGAAGTTGGGGGACGCCGACCGCTCGGGGGTCGCGTAACTAGTTA | |
| NR_003286.2_RNA18S5_r1_26 | /5Biosg/CCCGCGCCTGCCGGCGTAGGGTAGGCACACGCTGAGCCAGTCAGTGTAGCGCGCGT | 0.641666667 |
| (SEQ ID NO: 413) | GCAGCCCCGGACATCTAAGGGCATCACAGACCTGTTATTGCTCAATCTCGGGTGGCTGAACGCC | |
| NR_003286.2_RNA18S5_r1_27 | /5Biosg/CGTTCATGGGGAATAATTGCAATCCCCGATCCCCATCACGAATGGGGTTCAACGGG | 0.616666667 |
| (SEQ ID NO: 414) | TTACCCGCGCCTGCCGGCGTAGGGTAGGCACACGCTGAGCCAGTCAGTGTAGCGCGCGTGCAGC | |
| NR_003286.2_RNA18S5_r1_28 | /5Biosg/ACAAAGGGCAGGGACTTAATCAACGCAAGCTTATGACCCGCACTTACTGGGAATTC | 0.508333333 |
| (SEQ ID NO: 415) | CTCGTTCATGGGGAATAATTGCAATCCCCGATCCCCATCACGAATGGGGTTCAACGGGTTACCC | |
| NR_003286.2_RNA18S5_r1_29 | /5Biosg/GGGCCGATCCGAGGGCCTCACTAAACCATCCAATCGGTAGTAGCGACGGGCGGTGT | 0.55 |
| (SEQ ID NO: 416) | GTACAAAGGGCAGGGACTTAATCAACGCAAGCTTATGACCCGCACTTACTGGGAATTCCTCGTT | |
| NR_003286.2_RNA18S5_r1_30 | /5Biosg/GATAGTCAAGTTCGACCGTCTTCTCAGCGCTCCGCCAGGGCCGTGGGCCGACCCCG | 0.65 |
| (SEQ ID NO: 417) | GCGGGGCCGATCCGAGGGCCTCACTAAACCATCCAATCGGTAGTAGCGACGGGCGGTGTGTACA | |
| NR_003286.2_RNA18S5_r1_31 | /5Biosg/TAATGATCCTTCCGCAGGTTCACCTACGGAAACCTTGTTACGACTTTTACTTCCTC | 0.575 |
| (SEQ ID NO: 418) | TAGATAGTCAAGTTCGACCGTCTTCTCAGCGCTCCGCCAGGGCCGTGGGCCGACCCCGGCGGGG | |
| NR_003287.2_RNA28S5_r1.1_1 | /5Biosg/TCGGCGCTGGGCTCTTCCCTGTTCACTCGCCGTTACTGAGGGAATCCTGGTTAGTT | 0.55 |
| (SEQ ID NO: 419) | TCTTCTCCTCCGCTGACTAATATGCTTAAATTCAGCGGGTCGCCACGTCTGATCTGAGGTCGCG | |
| NR_003287.2_RNA28S5_r1.1_2 | /5Biosg/GCCGGGGAGCGGGTCTTCCGTACGCCACATGTCCCGCGCCCCGCCGCGGGGCGGGG | 0.666666667 |
| (SEQ ID NO: 420) | ATTCGGCGCTGGGCTCTTCCCTGTTCACTCGCCGTTACTGAGGGAATCCTGGTTAGTTTCTTCT | |
| NR_003287.2_RNA28S5_r1.1_3 | /5Biosg/TCACACCGTCCACGGGCTGGGCCTCGATCAGAAGGACTTGGGCCCCCCACGAGCGG | 0.75 |
| (SEQ ID NO: 421) | CGCCGGGGAGCGGGTCTTCCGTACGCCACATGTCCCGCGCCCCGCCGCGGGGCGGGGATTCGGC | |
| NR_003287.2_RNA28S5_r1.1_4 | /5Biosg/CCAAGCAACCCGACTCCGGGAAGACCCGGGCCCGGCGCGCCGGGGGCCGCTACCGG | 0.766666667 |
| (SEQ ID NO: 422) | CCTCACACCGTCCACGGGCTGGGCCTCGATCAGAAGGACTTGGGCCCCCCACGAGCGGCGCCGG | |
| NR_003287.2_RNA28S5_r1.1_5 | /5Biosg/GTCTCGTGCCGGTATTTAGCCTTAGATGGAGTTTACCACCCGCTTTGGGCTGCATT | 0.658333333 |
| (SEQ ID NO: 423) | CCCAAGCAACCCGACTCCGGGAAGACCCGGGCCCGGCGCGCCGGGGGCCGCTACCGGCCTCACA | |
| NR_003287.2_RNA28S5_r1.1_6 | /5Biosg/TTGAACTCTCTCTTCAAAGTTCTTTTCAACTTTCCCTTACGGTACTTGTTGACTAT | 0.458333333 |
| (SEQ ID NO: 424) | CGGTCTCGTGCCGGTATTTAGCCTTAGATGGAGTTTACCACCCGCTTTGGGCTGCATTCCCAAG | |
| NR_003287.2_RNA28S5_r1.1_7 | /5Biosg/CCTCCGGGCGGACTGCGCGGACCCCACCCGTTTACCTCTTAACGGTTTCACGCCCT | 0.525 |
| (SEQ ID NO: 425) | CTTGAACTCTCTCTTCAAAGTTCTTTTCAACTTTCCCTTACGGTACTTGTTGACTATCGGTCTC | |
| NR_003287.2_RNA28S5_r1.1_8 | /5Biosg/GGGGGCGGGAAAGATCCGCCGGGCCGCCGACACGGCCGGACCCGCCGCCGGGTTGA | 0.7 |
| (SEQ ID NO: 426) | ATCCTCCGGGCGGACTGCGCGGACCCCACCCGTTTACCTCTTAACGGTTTCACGCCCTCTTGAA | |
| NR_003287.2_RNA28S5_r1.1_9 | /5Biosg/GAGGAGGAGGAGGGGCGGCGGGGGAAGGGAGGGCGGGTGGAGGGGTCGGGAGGAAC | 0.775 |
| (SEQ ID NO: 427) | GGGGGGCGGGAAAGATCCGCCGGGCCGCCGACACGGCCGGACCCGCCGCCGGGTTGAATCCTCC | |
| NR_003287.2_RNA28S5_r1.- | /5Biosg/GCCACCTTCCCCGCCGGGCCTTCCCAGCCGTCCCGGAGCCGGTCGCGGCGCACCGC | 0.825 |
| 1_12 (SEQ ID NO: 428) | CGCGGTGGAAATGCGCCCGGCGGCGGCCGGTCGCCGGTCGGGGGACGGTCCCCCGCCGACCCCA | |
| NR_003287.2_RNA28S5_r1.- | /5Biosg/GGGGGGCGGAGACGGGGGAGGAGGAGGACGGACGGACGGACGGACGGGGCCCCCCG | 0.816666667 |
| 1_13 (SEQ ID NO: 429) | AGCCACCTTCCCCGCCGGGCCTTCCCAGCCGTCCCGGAGCCGGTCGCGGCGCACCGCCGCGGTG | |
| NR_003287.2_RNA28S5_r1.2_1 | /5Biosg/GAGGGGGGAGAGCGCGGCGACGGGTCTCGCTCCCTCGGCCCCGGGATTCGGCGAGT | 0.791666667 |
| (SEQ ID NO: 430) | GCTGCTGCCGGGGGGGCTGTAACACTCGGGGGGGGTTTCGGTCCCGCCGCCGCCGCCGCCGCCG | |
| NR_003287.2_RNA28S5_r1.2_2 | /5Biosg/GGCGCGCCCCCGCGGGGGAGACCCCCCTCGCGGGGGATTCCCCGCGGGGGTGGGCG | 0.825 |
| (SEQ ID NO: 431) | CCGGGAGGGGGGAGAGCGCGGCGACGGGTCTCGCTCCCTCGGCCCCGGGATTCGGCGAGTGCTG | |
| NR_003287.2_RNA28S5_r1.2_6 | /5Biosg/CGCCGACCCCGTGCGCTCGCTCCGCCGTCCCCCTCTTCGGGGGACGCGCGCGTGGC | 0.816666667 |
| (SEQ ID NO: 432) | CCCGAGAGAACCTCCCCCGGGCCCGACGGCGCGACCCGCCCGGGGCGCACTGGGGACAGTCCGC | |
| NR_003287.2_RNA28S5_r1.2_7 | /5Biosg/GCACGTGTTAGACTCCTTGGTCCGTGTTTCAAGACGGGTCGGGTGGGTAGCCGACG | 0.725 |
| (SEQ ID NO: 433) | TCGCCGCCGACCCCGTGCGCTCGCTCCGCCGTCCCCCTCTTCGGGGGACGCGCGCGTGGCCCCG | |
| NR_003287.2_RNA28S5_r1.2_8 | /5Biosg/AGCGCGCCGGCCTTCACCTTCATTGCGCCACGGCGGCTTTCGTGCGAGCCCCCGAC | 0.666666667 |
| (SEQ ID NO: 434) | TCGCGCACGTGTTAGACTCCTTGGTCCGTGTTTCAAGACGGGTCGGGTGGGTAGCCGACGTCGC | |
| NR_003287.2_RNA28S5_r1.2_9 | /5Biosg/CGGGCCGGTGGTGCGCCCTCGGCGGACTGGAGAGGCCTCGGGATCCCACCTCGGCC | 0.758333333 |
| (SEQ ID NO: 435) | GGCGAGCGCGCCGGCCTTCACCTTCATTGCGCCACGGCGGCTTTCGTGCGAGCCCCCGACTCGC | |
| NR_003287.2_RNA28S5_r1.- | /5Biosg/CCATCTTTCGGGTCCTAACACGTGCGCTCGTGCTCCACCTCCCCGGCGCGGCGGGC | 0.75 |
| 2_10 (SEQ ID NO: 436) | GAGACGGGCCGGTGGTGCGCCCTCGGCGGACTGGAGAGGCCTCGGGATCCCACCTCGGCCGGCG | |
| NR_003287.2_RNA28S5_r1.- | /5Biosg/GGACCGCTACGGACCTCCACCAGAGTTTCCTCTGGCTTCGCCCTGCCCAGGCATAG | 0.658333333 |
| 2_11 (SEQ ID NO: 437) | TTCACCATCTTTCGGGTCCTAACACGTGCGCTCGTGCTCCACCTCCCCGGCGCGGCGGGCGAGA | |
| NR_003287.2_RNA28S5_r1.- | /5Biosg/TAGATGGTTCGATTAGTCTTTCGCCCCTATACCCAGGTCGGACGACCGATTTGCAC | 0.566666667 |
| 2_12 (SEQ ID NO: 438) | GTCAGGACCGCTACGGACCTCCACCAGAGTTTCCTCTGGCTTCGCCCTGCCCAGGCATAGTTCA | |
| NR_003287.2_RNA28S5_r1.- | /5Biosg/TGCGTCGGGTCTGCGAGAGCGCCAGCTATCCTGAGGGAAACTTCGGAGGGAACCAG | 0.566666667 |
| 2_13 (SEQ ID NO: 439) | CTACTAGATGGTTCGATTAGTCTTTCGCCCCTATACCCAGGTCGGACGACCGATTTGCACGTCA | |
| NR_003287.2_RNA28S5_r1.- | /5Biosg/TCGTTTCGGCCCCAAGACCTCTAATCATTCGCTTTACCGGATAAAACTGCGTGGCG | 0.583333333 |
| 2_14 (SEQ ID NO: 440) | GGGGTGCGTCGGGTCTGCGAGAGCGCCAGCTATCCTGAGGGAAACTTCGGAGGGAACCAGCTAC | |
| NR_003287.2_RNA28S5_r1.- | /5Biosg/CCGGCTCCACGCCAGCGAGCCGGGCTTCTTACCCATTTAAAGTTTGAGAATAGGTT | 0.541666667 |
| 2_15 (SEQ ID NO: 441) | GAGATCGTTTCGGCCCCAAGACCTCTAATCATTCGCTTTACCGGATAAAACTGCGTGGCGGGGG | |
| NR_003287.2_RNA28S5_r1.- | /5Biosg/CATCCCGCAGCGCCAGTTCTGCTTACCAAAAGTGGCCCACTAGGCACTCGCATTCC | 0.566666667 |
| 2_16 (SEQ ID NO: 442) | ACGCCCGGCTCCACGCCAGCGAGCCGGGCTTCTTACCCATTTAAAGTTTGAGAATAGGTTGAGA | |
| NR_003287.2_RNA28S5_r1.- | /5Biosg/AACACCTTTTCTGGGGTCTGATGAGCGTCGGCATCGGGCGCCTTAACCCGGCGTTC | 0.6 |
| 2_17 (SEQ ID NO: 443) | GGTTCATCCCGCAGCGCCAGTTCTGCTTACCAAAAGTGGCCCACTAGGCACTCGCATTCCACGC | |
| NR_003287.2_RNA28S5_r1.- | /5Biosg/TTACACACTCCTTAGCGGATTCCGACTTCCATGGCCACCGTCCTGCTGTCTATATC | 0.558333333 |
| 2_18 (SEQ ID NO: 444) | AACCAACACCTTTTCTGGGGTCTGATGAGCGTCGGCATCGGGCGCCTTAACCCGGCGTTCGGTT | |
| NR_003287.2_RNA28S5_r1.- | /5Biosg/ATGGGCCCGACGCTCCAGCGCCATCCATTTTCAGGGCTAGTTGATTCGGCAGGTGA | 0.55 |
| 2_19 (SEQ ID NO: 445) | GTTGTTACACACTCCTTAGCGGATTCCGACTTCCATGGCCACCGTCCTGCTGTCTATATCAACC | |
| NR_003287.2_RNA28S5_r1.- | /5Biosg/CGCGCGCGCGCGCCGCCCCCGCCGCTCCCGTCCACTCTCGACTGCCGGCGACGGCC | 0.716666667 |
| 2_20 (SEQ ID NO: 446) | GGGTATGGGCCCGACGCTCCAGCGCCATCCATTTTCAGGGCTAGTTGATTCGGCAGGTGAGTTG | |
| NR_003287.2_RNA28S5_r1.- | /5Biosg/GAAGGACCCCACACCCCCGCCGCCGCCGCCGCCGCCGCCCTCCGACGCACACCACA | 0.833333333 |
| 2_21 (SEQ ID NO: 447) | CGCGCGCGCGCGCGCGCCGCCCCCGCCGCTCCCGTCCACTCTCGACTGCCGGCGACGGCCGGGT | |
| NR_003287.2_RNA28S5_r1.- | /5Biosg/GCTTCAAGGCTCACCGCAGCGGCCCTCCTACTCGTCGCGGCGTAGCGTCCGCGGGG | 0.808333333 |
| 2_23 (SEQ ID NO: 448) | CTCCGGGGGCGGGGAGCGGGGCGTGGGCGGGAGGAGGGGAGGAGGCGTGGGGGGGGGGGCGGGG | |
| NR_003287.2_RNA28S5_r1.- | /5Biosg/TATTTGCTACTACCACCAAGATCTGCACCTGCGGCGGCTCCACCCGGGCCCGCGCC | 0.691666667 |
| 2_24 (SEQ ID NO: 449) | CTAGGCTTCAAGGCTCACCGCAGCGGCCCTCCTACTCGTCGCGGCGTAGCGTCCGCGGGGCTCC | |
| NR_003287.2_RNA28S5_r1.- | /5Biosg/GTTCAACTGCTGTTCACATGGAACCCTTCTCCACTTCGGCCTTCAAAGTTCTCGTT | 0.558333333 |
| 2_25 (SEQ ID NO: 450) | TGAATATTTGCTACTACCACCAAGATCTGCACCTGCGGCGGCTCCACCCGGGCCCGCGCCCTAG | |
| NR_003287.2_RNA28S5_r1.- | /5Biosg/AGGCCATCGCCCGTCCCTTCGGAACGGCGCTCGCCCATCTCTCAGGACCGACTGAC | 0.566666667 |
| 2_26 (SEQ ID NO: 451) | CCATGTTCAACTGCTGTTCACATGGAACCCTTCTCCACTTCGGCCTTCAAAGTTCTCGTTTGAA | |
| NR_003287.2_RNA28S5_r1.- | /5Biosg/CCGCCACTCCGGATTCGGGGATCTGAACCCGACTCCCTTTCGATCGGCCGAGGGCA | 0.666666667 |
| 2_27 (SEQ ID NO: 452) | ACGGAGGCCATCGCCCGTCCCTTCGGAACGGCGCTCGCCCATCTCTCAGGACCGACTGACCCAT | |
| NR_003287.2_RNA28S5_r1.- | /5Biosg/CCCGCCGGCTTCTCCGGGATCGGTCGCGTTACCGCACTGGACGCCTCGCGGCGCCC | 0.7 |
| 2_28 (SEQ ID NO: 453) | ATCTCCGCCACTCCGGATTCGGGGATCTGAACCCGACTCCCTTTCGATCGGCCGAGGGCAACGG | |
| NR_003287.2_RNA28S5_r1.- | /5Biosg/GGCGAACCCATTCCAGGGCGCCCTGCCCTTCACAAAGAAAAGAGAACTCTCCCCGG | 0.675 |
| 2_29 (SEQ ID NO: 454) | GGCTCCCGCCGGCTTCTCCGGGATCGGTCGCGTTACCGCACTGGACGCCTCGCGGCGCCCATCT | |
| NR_003287.2_RNA28S5_r1.- | /5Biosg/AGAGCTCACCGGACGCCGCCGGAACCGCGACGCTTTCCAAGGCACGGGCCCCTCTC | 0.666666667 |
| 2_30 (SEQ ID NO: 455) | TCGGGGCGAACCCATTCCAGGGCGCCCTGCCCTTCACAAAGAAAAGAGAACTCTCCCCGGGGCT | |
| NR_003287.2_RNA28S5_r1.- | /5Biosg/ATATGGGTACGGCCCGGCGCGAGATTTACACCCTCTCCCCCGGATTTTCAAGGGCC | 0.666666667 |
| 2_31 (SEQ ID NO: 456) | AGCGAGAGCTCACCGGACGCCGCCGGAACCGCGACGCTTTCCAAGGCACGGGCCCCTCTCTCGG | |
| NR_003287.2_RNA28S5_r1.- | /5Biosg/TTCCCTTACCTACATTGTTCCAACATGCCAGAGGCTGTTCACCTTGGAGACCTGCT | 0.575 |
| 2_32 (SEQ ID NO: 457) | GCGGATATGGGTACGGCCCGGCGCGAGATTTACACCCTCTCCCCCGGATTTTCAAGGGCCAGCG | |
| NR_003287.2_RNA28S5_r1.- | /5Biosg/CGACCGACCCAGCCCTTAGAGCCAATCCTTATCCCGAAGTTACGGATCCGGCTTGC | 0.566666667 |
| 2_33 (SEQ ID NO: 458) | CGACTTCCCTTACCTACATTGTTCCAACATGCCAGAGGCTGTTCACCTTGGAGACCTGCTGCGG | |
| NR_003287.2_RNA28S5_r1.- | /5Biosg/GGGGGCGGCGGCGCCTCGTCCAGCCGCGGCGCGCGCCCAGCCCCGCTTCGCGCCCC | 0.741666667 |
| 2_34 (SEQ ID NO: 459) | AGCCCGACCGACCCAGCCCTTAGAGCCAATCCTTATCCCGAAGTTACGGATCCGGCTTGCCGAC | |
| NR_003287.2_RNA28S5_r1.- | /5Biosg/AGGGGGGAGGACGGGGAGCGGGGGAGAGAGAGAGAGAGAGGGCGCGGGGCGGGGAG | 0.833333333 |
| 2_36 (SEQ ID NO: 460) | GGAGCGAGCGGCGCGCGCGGGGTGGGGCGGGGGAGGGCCGCGAGGGGGGTGCCCCGGGCGTGGG | |
| NR_003287.2_RNA28S5_r1.- | /5Biosg/GCCCCTGCCGCCCCGACCCTTCTCCCCCCGCCGCCGCCCCCACGCGGCGCTCCCCC | 0.825 |
| 2_37 (SEQ ID NO: 461) | GGGGAGGGGGGAGGACGGGGAGCGGGGGAGAGAGAGAGAGAGAGGGCGCGGGGCGGGGAGGGAG | |
| NR_003287.2_RNA28S5_r1.- | /5Biosg/TTCCCCTGGTCCGCACCAGTTCTAAGTCGGCTGCTAGGCGCCGGCCGAGGCGAGGC | 0.816666667 |
| 2_45 (SEQ ID NO: 462) | GCCGCGCGGAACCGCGGCCCCGGGGGCGGACCCGGCGGGGGGGACCGGCCCGCGGCCCCTCCGC | |
| NR_003287.2_RNA28S5_r1.- | /5Biosg/ACATCGCGTCAACACCCGCCGCGGGCCTTCGCGATGCTTTGTTTTAATTAAACAGT | 0.625 |
| 2_46 (SEQ ID NO: 463) | CGGATTCCCCTGGTCCGCACCAGTTCTAAGTCGGCTGCTAGGCGCCGGCCGAGGCGAGGCGCCG | |
| NR_003287.2_RNA28S5_r1.- | /5Biosg/CGTTTACCCGCGCTTCATTGAATTTCTTCACTTTGACATTCAGAGCACTGGGCAGA | 0.491666667 |
| 2_47 (SEQ ID NO: 464) | AATCACATCGCGTCAACACCCGCCGCGGGCCTTCGCGATGCTTTGTTTTAATTAAACAGTCGGA | |
| NR_003287.2_RNA28S5_r1.- | /5Biosg/GCGTCACTAATTAGATGACGAGGCATTTGGCTACCTTAAGAGAGTCATAGTTACTC | 0.458333333 |
| 2_48 (SEQ ID NO: 465) | CCGCCGTTTACCCGCGCTTCATTGAATTTCTTCACTTTGACATTCAGAGCACTGGGCAGAAATC | |
| NR_003287.2_RNA28S5_r1.- | /5Biosg/GGCTGTGGTTTCGCTGGATAGTAGGTAGGGACAGTGGGAATCTCGTTCATCCATTC | 0.491666667 |
| 2_49 (SEQ ID NO: 466) | ATGCGCGTCACTAATTAGATGACGAGGCATTTGGCTACCTTAAGAGAGTCATAGTTACTCCCGC | |
| NR_003287.2_RNA28S5_r1.- | /5Biosg/ACTAGAGTCAAGCTCAACAGGGTCTTCTTTCCCCGCTGATTCCGCCAAGCCCGTTC | 0.533333333 |
| 2_50 (SEQ ID NO: 467) | CCTTGGCTGTGGTTTCGCTGGATAGTAGGTAGGGACAGTGGGAATCTCGTTCATCCATTCATGC | |
| NR_003287.2_RNA28S5_r1.- | /5Biosg/GGGGGGGCGCCGGGGGCCTCCCACTTATTCTACACCTCTCATGTCTCTTCACCGTG | 0.6 |
| 2_51 (SEQ ID NO: 468) | CCAGACTAGAGTCAAGCTCAACAGGGTCTTCTTTCCCCGCTGATTCCGCCAAGCCCGTTCCCTT | |
| NR_003287.2_RNA28S5_r1.- | /5Biosg/TATTTCACCGGCGGCCCGCAGGGCCGGCGGACCCCGCCCCGGGCCCCTCGCGGGGA | 0.733333333 |
| 2_52 (SEQ ID NO: 469) | CACCGGGGGGGCGCCGGGGGCCTCCCACTTATTCTACACCTCTCATGTCTCTTCACCGTGCCAG | |
| NR_003287.2_RNA28S5_r1.- | /5Biosg/GCCCCTCGGGGCTCGCCCCCCCGCCTCACCGGGTCAGTGAAAAAACGATCAGAGTA | 0.741666667 |
| 2_53 (SEQ ID NO: 470) | GTGGTATTTCACCGGCGGCCCGCAGGGCCGGCGGACCCCGCCCCGGGCCCCTCGCGGGGACACC | |
| NR_003287.2_RNA28S5_r1.- | /5Biosg/TCCCCGGAGCGGGTCGCGCCCGGCCGGCGCGCGGCCGGGCGCTTGGCGCCAGAAGC | 0.75 |
| 2_54 (SEQ ID NO: 471) | GAGAGCCCCTCGGGGCTCGCCCCCCCGCCTCACCGGGTCAGTGAAAAAACGATCAGAGTAGTGG | |
| NR_003287.2_RNA28S5_r1.- | /5Biosg/GACACCTGCGTTACCGTTTGACAGGTGTACCGCCCCAGTCAAACTCCCCACCTGGC | 0.716666667 |
| 2_55 (SEQ ID NO: 472) | ACTGTCCCCGGAGCGGGTCGCGCCCGGCCGGCGCGCGGCCGGGCGCTTGGCGCCAGAAGCGAGA | |
| NR_003287.2_RNA28S5_r1.- | /5Biosg/AAGCGAGCTTTTGCCCTTCTGCTCCACGGGAGGTTTCTGTCCTCCCTGAGCTCGCC | 0.591666667 |
| 2_56 (SEQ ID NO: 473) | TTAGGACACCTGCGTTACCGTTTGACAGGTGTACCGCCCCAGTCAAACTCCCCACCTGGCACTG | |
| NR_003287.2_RNA28S5_r1.- | /5Biosg/GGTCAGAAGGATCGTGAGGCCCCGCTTTCACGGTCTGTATTCGTACTGAAAATCAA | 0.541666667 |
| 2_57 (SEQ ID NO: 474) | GATCAAGCGAGCTTTTGCCCTTCTGCTCCACGGGAGGTTTCTGTCCTCCCTGAGCTCGCCTTAG | |
| NR_003287.2_RNA28S5_r1.- | /5Biosg/CGCCACAAGCCAGTTATCCCTGTGGTAACTTTTCTGACACCTCCTGCTTAAAACCC | 0.483333333 |
| 2_58 (SEQ ID NO: 475) | AAAAGGTCAGAAGGATCGTGAGGCCCCGCTTTCACGGTCTGTATTCGTACTGAAAATCAAGATC | |
| NR_003287.2_RNA28S5_r1.- | /5Biosg/CAATGATAGGAAGAGCCGACATCGAAGGATCAAAAAGCGACGTCGCTATGAACGCT | 0.483333333 |
| 2_59 (SEQ ID NO: 476) | TGGCCGCCACAAGCCAGTTATCCCTGTGGTAACTTTTCTGACACCTCCTGCTTAAAACCCAAAA | |
| NR_003287.2_RNA28S5_r1.- | /5Biosg/ACCCAGCTCACGTTCCCTATTAGTGGGTGAACAATCCAACGCTTGGTGAATTCTGC | 0.491666667 |
| 2_60 (SEQ ID NO: 477) | TTCACAATGATAGGAAGAGCCGACATCGAAGGATCAAAAAGCGACGTCGCTATGAACGCTTGGC | |
| NR_003287.2_RNA28S5_r1.- | /5Biosg/TTACCATGGCAACAACACATCATCAGTAGGGTAAAACTAACCTGTCTCACGACGGT | 0.458333333 |
| 2_61 (SEQ ID NO: 478) | CTAAACCCAGCTCACGTTCCCTATTAGTGGGTGAACAATCCAACGCTTGGTGAATTCTGCTTCA | |
| NR_003287.2_RNA28S5_r1.- | /5Biosg/CCTCAGCCAAGCACATACACCAAATGTCTGAACCTGCGGTTCCTCTCGTACTGAGC | 0.483333333 |
| 2_62 (SEQ ID NO: 479) | AGGATTACCATGGCAACAACACATCATCAGTAGGGTAAAACTAACCTGTCTCACGACGGTCTAA | |
| NR_003287.2_RNA28S5_r1.- | /5Biosg/GATTCTGACTTAGAGGCGTTCAGTCATAATCCCACAGATGGTAGCTTCGCCCCATT | 0.516666667 |
| 2_63 (SEQ ID NO: 480) | GGCTCCTCAGCCAAGCACATACACCAAATGTCTGAACCTGCGGTTCCTCTCGTACTGAGCAGGA | |
| NR_003287.2_RNA28S5_r1.- | /5Biosg/ACCGGCTATCCGAGGCCAACCGAGGCTCCGCGGCGCTGCCGTATCGTTCCGCCTGG | 0.616666667 |
| 2_64 (SEQ ID NO: 481) | GCGGGATTCTGACTTAGAGGCGTTCAGTCATAATCCCACAGATGGTAGCTTCGCCCCATTGGCT | |
| NR_003287.2_RNA28S5_r1.- | /5Biosg/TCCCGCGCGCGCGGGGCGCGTGGAGGGGGGGGGCGGCCCGCCGGCGGGGACAGGCG | 0.825 |
| 2_65 (SEQ ID NO: 482) | GGGGACCGGCTATCCGAGGCCAACCGAGGCTCCGCGGCGCTGCCGTATCGTTCCGCCTGGGCGG | |
| NR_003287.2_RNA28S5_r1.- | /5Biosg/ACGAACGTGCGGTGCGTGACGGGCGAGGGGGCGGCCGCCTCTCCGGCCGCGCCCCG | 0.808333333 |
| 2_67 (SEQ ID NO: 483) | TTTCCCAGGACGAAGGGCACTCCGCACCGGACCCCGGTCCCGGCGCGCGGCGGGGCACGCGCCC | |
| NR_003287.2_RNA28S5_r1.- | /5Biosg/ACGTACGAAACCCCGACCCAGAAGCAGGTCGTCTACGAATGGTTTAGCGCCAGGTT | 0.683333333 |
| 2_68 (SEQ ID NO: 484) | CCCCACGAACGTGCGGTGCGTGACGGGCGAGGGGGCGGCCGCCTCTCCGGCCGCGCCCCGTTTC | |
| NR_003287.2_RNA28S5_r1.- | /5Biosg/GACAAACCCTTGTGTCGAGGGCTGACTTTCAATAGATCGCAGCGAGGGAGCTGCTC | 0.566666667 |
| 2_69 (SEQ ID NO: 485) | TGCTACGTACGAAACCCCGACCCAGAAGCAGGTCGTCTACGAATGGTTTAGCGCCAGGTTCCCC | |
| 5SrRNA_X71801_r1_1 | /5Biosg/CTTCCACCACATCGGGCCCGCTCGGAGCAGGGAGTGCTCCGAGGCGTCAGGGCCCA | 0.716666667 |
| (SEQ ID NO: 486) | GGGCCCACGATCCTGGGACGCCCTCCGGTCCTCCGCCCTGTCGCGGAGGCAGCGTTTTGGATCC | |
| 5SrRNA_X71801_r1_2 | /5Biosg/GATCGGGGACCCCCGAGCCGCTGGCCCGCGGCCTTCCCCCGGCTCCCGCGCTCCCG | 0.783333333 |
| (SEQ ID NO: 487) | AGCTTCCACCACATCGGGCCCGCTCGGAGCAGGGAGTGCTCCGAGGCGTCAGGGCCCAGGGCCC | |
| 5SrRNA_X71801_r1_3 | /5Biosg/GCCCGGCCGTGCCCGCCGGATTGCAGCCGACACCGCCAGCCCGGGGCCGCGGGGCT | 0.825 |
| (SEQ ID NO: 488) | CGGATCGGGGACCCCCGAGCCGCTGGCCCGCGGCCTTCCCCCGGCTCCCGCGCTCCCGAGCTTC | |
| 5SrRNA_X71801_r1_4 | /5Biosg/GGTGGTATGGCCGTAGACGCTGAAGGAGGCGCCTGGCTGCCCCAAGAGCCCAGCCC | 0.766666667 |
| (SEQ ID NO: 489) | CGCCCGGCCGTGCCCGCCGGATTGCAGCCGACACCGCCAGCCCGGGGCCGCGGGGCTCGGATCG | |
| 5SrRNA_X71801_r1_5 | /5Biosg/ACTAACCAGGCCCGACCCTGCTTAGCTTCCGAGATCAGACGAGATCGGGCGCGTTC | 0.666666667 |
| (SEQ ID NO: 490) | AGGGTGGTATGGCCGTAGACGCTGAAGGAGGCGCCTGGCTGCCCCAAGAGCCCAGCCCCGCCCG | |
| 5SrRNA_X71801_r1_6 | /5Biosg/AAAAGCCAAAGAAAAAGCCTACAGCACCCGGTATTCCCAGGCGGTCTCCCATCCAA | 0.566666667 |
| (SEQ ID NO: 491) | GTACTAACCAGGCCCGACCCTGCTTAGCTTCCGAGATCAGACGAGATCGGGCGCGTTCAGGGTG | |
| 5SrRNA_X71801_r1_7 | /5Biosg/CACTCCAGCCTGGGCGACAGGGCGAGACTCCGTCTGGAAGAAAAGGAAAGAAACAG | 0.533333333 |
| (SEQ ID NO: 492) | CAAAAAGCCAAAGAAAAAGCCTACAGCACCCGGTATTCCCAGGCGGTCTCCCATCCAAGTACTA | |
| 5SrRNA_X71801_r1_8 | /5Biosg/GGGGAATGGCGTGGACCCGGGAGGCGGAGCTTGCAGTGAGCCGAGATGGCGCCACC | 0.625 |
| (SEQ ID NO: 493) | GCACTCCAGCCTGGGCGACAGGGCGAGACTCCGTCTGGAAGAAAAGGAAAGAAACAGCAAAAAG | |
| 5SrRNA_X71801_r1_9 | /5Biosg/AAGTAGCCGGGCGTGGTGGCGGGCGCCTGTAGGCCCAGCTACTCGGGAGGCTGAGG | 0.716666667 |
| (SEQ ID NO: 494) | CCGGGGAATGGCGTGGACCCGGGAGGCGGAGCTTGCAGTGAGCCGAGATGGCGCCACCGCACTC | |
| 5SrRNA_X71801_r1_10 | /5Biosg/GAGCTCCAGACCATCCCGGCTAACAGGGTGAAAGCCCGTCTCTAGGAAAAATAGAA | 0.633333333 |
| (SEQ ID NO: 495) | CAAAGTAGCCGGGCGTGGTGGCGGGCGCCTGTAGGCCCAGCTACTCGGGAGGCTGAGGCCGGGG | |
| RNA5-8S5_NR_003285_r1_1 | /5Biosg/CCGGGGCCGCAAGTGCGTTCGAAGTGTCGATGATCAATGTGTCCTGCAATTCACAT | 0.541666667 |
| (SEQ ID NO: 496) | TAATTCTCGCAGCTAGCTGCGTTCTTCATCGACGCACGAGCCGAGTGATCCACCGCTAAGAGTC | |
| RNA5-8S5_NR_003285_r1_2 | /5Biosg/AAGCGACGCTCAGACAGGCGTAGCCCCGGGAGGAACCCGGGGCCGCAAGTGCGTTC | 0.558333333 |
| (SEQ ID NO: 497) | GAAGTGTCGATGATCAATGTGTCCTGCAATTCACATTAATTCTCGCAGCTAGCTGCGTTCTTCA | |

APPENDIX 6
60-mer DNA rRNA Capture Probes/Baits at 1x coverage, 85% GC restriction with dual 5′ + 3′-biotin
(Note: /5Biosg/ = 5′-biotin and /3Bio/ = 3′-biotin)

| Name | Sequence |
|---|---|
| KF899911.1_12SrRNA_r1_1.1 | /5Biosg/GCGTGCTTGATGCTTGTCCCTTTTGATCGTGGTGATTTAGAGGGTGAACTCACTGGAACG/ |
| (SEQ ID NO: 498) | 3Bio/ |
| KF899911.1_12SrRNA_r1_1.2 | /5Biosg/GGGATGCTTGCATGTGTAATCTTACTAAGAGCTAATAGAAAGGCTAGGACCAAACCTATT/ |
| (SEQ ID NO: 499) | 3Bio/ |
| KF899911.1_12SrRNA_r1_2.1 | /5Biosg/GAAATTGACCAACCCTGGGGTTAGTATAGCTTAGTTAAACTTTCGTTTATTGCTAAAGGT/ |
| (SEQ ID NO: 500) | 3Bio/ |
| KF899911.1_12SrRNA_r1_2.2 | /5Biosg/TAATCACTGCTGTTTCCCGTGGGGGTGTGGCTAGGCTAAGCGTTTTGAGCTGCATTGCTG/ |
| (SEQ ID NO: 501) | 3Bio/ |
| KF899911.1_12SrRNA_r1_3.1 | /5Biosg/ACTGGAGTTTTTTACAACTCAGGTGAGTTTTAGCTTTATTGGGGAGGGGGTGATCTAAAA/ |
| (SEQ ID NO: 502) | 3Bio/ |
| KF899911.1_12SrRNA_r1_3.2 | /5Biosg/CACTCTTTACGCCGGCTTCTATTGACTTGGGTTAATCGTGTGACCGCGGTGGCTGGCACG/ |
| (SEQ ID NO: 503) | 3Bio/ |
| KF899911.1_12SrRNA_r1_4.1 | /5Biosg/TGTTGATTTAACTGTTGAGGTTTAGGGCTAAGCATAGTGGGGTATCTAATCCCAGTTTGG/ |
| (SEQ ID NO: 504) | 3Bio/ |
| KF899911.1_12SrRNA_r1_4.2 | /5Biosg/GTCTTAGCTATTGTGTGTTCAGATATGTTAAAGCCACTTTCGTAGTCTATTTTGTGTCAA/ |
| (SEQ ID NO: 505) | 3Bio/ |
| KF899911.1_12SrRNA_r1_5.1 | /5Biosg/GAGGTGGTGAGGTTGATCGGGGTTTATCGATTACAGAACAGGCTCCTCTAGAGGGATATG/ |
| (SEQ ID NO: 506) | 3Bio/ |
| KF899911.1_12SrRNA_r1_5.2 | /5Biosg/AAGCACCGCCAGGTCCTTTGAGTTTTAAGCTGTGGCTCGTAGTGTTCTGGCGAGCAGTTT/ |
| (SEQ ID NO: 507) | 3Bio/ |
| KF899911.1_12SrRNA_r1_6.1 | /5Biosg/GCCCATTTCTTGCCACCTCATGGGCTACACCTTGACCTAACGTCTTTACGTGGGTACTTG/ |
| (SEQ ID NO: 508) | 3Bio/ |
| KF899911.1_12SrRNA_r1_6.2 | /5Biosg/CGCTTACTTTGTAGCCTTCATCAGGGTTTGCTGAAGATGGCGGTATATAGGCTGAGCAAG/ |
| (SEQ ID NO: 509) | 3Bio/ |
| KF899911.1_12SrRNA_r1_7.1 | /5Biosg/TGTGTACGCGCTTCAGGGCCCTGTTCAACTAAGCACTCTACTCTCAGTTTACTGCTAAAT/ |
| (SEQ ID NO: 510) | 3Bio/ |
| KF899911.1_12SrRNA_r1_7.2 | /5Biosg/CCACCTTCGACCCTTAAGTTTCATAAGGGCTATCGTAGTTTTCTGGGGTAGAAAATGTAG/ |
| (SEQ ID NO: 511) | 3Bio/ |
| KF899911.1_12SrRNA_r1_8.1 | /5Biosg/GTTCGTCCAAGTGCACTTTCCAGTACACTTACCATGTTACGACTTGTCTCCTCTATATAA/ |
| (SEQ ID NO: 512) | 3Bio/ |
| KF899911.1_12SrRNA_r1_8.2 | /5Biosg/ATGCGTAGGGGTTTTAGTTAAATGTCCTTTGAAGTATACTTGAGGAGGGTGACGGGCGGT/ |
| (SEQ ID NO: 513) | 3Bio/ |
| KF899911.1_16SrRNA_r1_1.1 | /5Biosg/TTGCGGTACTATATCTATTGCGCCAGGTTTCAATTTCTATCGCCTATACTTTATTTGGGT/ |
| (SEQ ID NO: 514) | 3Bio/ |
| KF899911.1_16SrRNA_r1_1.2 | /5Biosg/AAATGGTTTGGTTAAGGTTGTCTGGTAGTAAGGTGGAGTGGGTTTGGGGCTAGGTTTAGC/ |
| (SEQ ID NO: 515) | 3Bio/ |
| KF899911.1_16SrRNA_r1_2.1 | /5Biosg/GTTTCGGGGGTCTTAGCTTTGGCTCTCCTTGCAAAGTTATTTCTAGTTAATTCATTATGC/ |
| (SEQ ID NO: 516) | 3Bio/ |
| KF899911.1_16SrRNA_r1_2.2 | /5Biosg/AGAAGGTATAGGGGTTAGTCCTTGCTATATTATGCTTGGTTATAATTTTTCATCTTTCCC/ |
| (SEQ ID NO: 517) | 3Bio/ |
| KF899911.1_16SrRNA_r1_3.1 | /5Biosg/ATCTTGGACAACCAGCTATCACCAGGCTCGGTAGGTTTGTCGCCTCTACCTATAAATCTT/ |
| (SEQ ID NO: 518) | 3Bio/ |
| KF899911.1_16SrRNA_r1_3.2 | /5Biosg/CCCACTATTTTGCTACATAGACGGGTGTGCTCTTTTAGCTGTTCTTAGGTAGCTCGTCTG/ |
| (SEQ ID NO: 519) | 3Bio/ |
| KF899911.1_16SrRNA_r1_4.1 | /5Biosg/CTCTCTCTACAAGGTTTTTTCCTAGTGTCCAAAGAGCTGTTCCTCTTTGGACTAACAGTT/ |
| (SEQ ID NO: 520) | 3Bio/ |
| KF899911.1_16SrRNA_r1_4.2 | /5Biosg/AAATTTACAAGGGGATTTAGAGGGTTCTGTGGGCAAATTTAAAGTTGAACTAAGATTCTA/ |
| (SEQ ID NO: 521) | 3Bio/ |
| KF899911.1_16SrRNA_r1_5.1 | /5Biosg/CCAATTGGGTGTGAGGAGTTCAGTTATATGTTTGGGATTTTTTAGGTAGTGGGTGTTGAG/ |
| (SEQ ID NO: 522) | 3Bio/ |
| KF899911.1_16SrRNA_r1_5.2 | /5Biosg/CTTGAACGCTTTCTTAATTGGTGGCTGCTTTTAGGCCTACTATGGGTGTTAAATTTTTTA/ |
| (SEQ ID NO: 523) | 3Bio/ |
| KF899911.1_16SrRNA_r1_6.1 | /5Biosg/GTAGATATTGGGCTGTTAATTGTCAGTTCAGTGTTTTAATCTGACGCAGGCTTATGCGGA/ |
| (SEQ ID NO: 524) | 3Bio/ |
| KF899911.1_16SrRNA_r1_6.2 | /5Biosg/GGAGAATGTTTTCATGTTACTTATACTAACATTAGTTCTTCTATAGGGTGATAGATTGGT/ |
| (SEQ ID NO: 525) | 3Bio/ |
| KF899911.1_16SrRNA_r1_7.1 | /5Biosg/TGTTTTTGGTAAACAGGCGGGGTAAGATTTGCCGAGTTCCTTTTACTTTTTTTAACCTTT/ |
| (SEQ ID NO: 526) | 3Bio/ |
| KF899911.1_16SrRNA_r1_7.2 | /5Biosg/CCTTATGAGCATGCCTGTGTTGGGTTGACAGTGAGGGTAATAATGACTTGTTGGTTGATT/ |
| (SEQ ID NO: 527) | 3Bio/ |
| KF899911.1_16SrRNA_r1_8.1 | /5Biosg/TACAGGTCCCTATTTAAGGAACAAGTGATTATGCTACCTTTGCACGGTTAGGGTACCGCG/ |
| (SEQ ID NO: 528) | 3Bio/ |
| KF899911.1_16SrRNA_r1_8.2 | /5Biosg/GCCGTTAAACATGTGTCACTGGGCAGGCGGTGCCTCTAATACTGGTGATGCTAGAGGTGA/ |
| (SEQ ID NO: 529) | 3Bio/ |
| KF899911.1_16SrRNA_r1_9.1 | /5Biosg/TTAATAAATTAAAGCTCCATAGGGTCTTCTCGTCTTGCTGTGTCATGCCCGCCTCTTCAC/ |
| (SEQ ID NO: 530) | 3Bio/ |
| KF899911.1_16SrRNA_r1_9.2 | /5Biosg/GGGCAGGTCAATTTCACTGGTTAAAAGTAAGAGACAGCTGAACCCTCGTGGAGCCATTCA/ |
| (SEQ ID NO: 531) | 3Bio/ |
| KF899911.1_16SrRNA_r1_10.1 | /5Biosg/TGGTGAAGTCTTAGCATGTACTGCTCGGAGGTTGGGTTCTGCTCCGAGGTCGCCCCAACC/ |
| (SEQ ID NO: 532) | 3Bio/ |
| KF899911.1_16SrRNA_r1_10.2 | /5Biosg/GAAATTTTTAATGCAGGTTTGGTAGTTTAGGACCTGTGGGTTTGTTAGGTACTGTTTGCA/ |
| (SEQ ID NO: 533) | 3Bio/ |
| KF899911.1_16SrRNA_r1_11.1 | /5Biosg/GAGGTCGTAAACCCTATTGTTGATATGGACTCTAGAATAGGATTGCGCTGTTATCCCTAG/ |
| (SEQ ID NO: 534) | 3Bio/ |
| KF899911.1_16SrRNA_r1_11.2 | /5Biosg/GGTAACTTGTTCCGTTGGTCAAGTTATTGGATCAATTGAGTATAGTAGTTCGCTTTGACT/ |
| (SEQ ID NO: 535) | 3Bio/ |
| KF899911.1_16SrRNA_r1_12.1 | /5Biosg/AAGTAGATAGAAACCGACCTGGATTACTCCGGTCTGAACTCAGATCACGTAGGACTTTAA/ |
| (SEQ ID NO: 536) | 3Bio/ |
| KF899911.1_16SrRNA_r1_12.2 | /5Biosg/TCGTTGAACAAACGAACCTTTAATAGCGGCTGCACCATCGGGATGTCCTGATCCAACATC/ |
| (SEQ ID NO: 537) | 3Bio/ |
| KF899911.1_16SrRNA_r1_13.1 | /5Biosg/AAACCCTGTTCTTGGGTGGGTGTGGGTATAATACTAAGTTGAGATGATATCATTTACGGG/ |
| (SEQ ID NO: 538) | 3Bio/ |
| KF899911.1_16SrRNA_r1_13.2 | /5Biosg/GGAAGGCGCTTTGTGAAGTAGGCCTTATTTCTCTTGTCCTTTCGTACAGGGAGGAATTTG/ |
| (SEQ ID NO: 539) | 3Bio/ |
| NR_003286.2_RNA18S5_r1_1.1 | /5Biosg/AAGGAACCATAACTGATTTAATGAGCCATTCGCAGTTTCACTGTACCGGCCGTGCGTACT/ |
| (SEQ ID NO: 540) | 3Bio/ |
| NR_003286.2_RNA18S5_r1_1.2 | /5Biosg/CAGACATGCATGGCTTAATCTTTGAGACAAGCATATGCTACTGGCAGGATCAACCAGGTA/ |
| (SEQ ID NO: 541) | 3Bio/ |
| NR_003286.2_RNA18S5_r1_2.1 | /5Biosg/GTTGGTTTTGATCTGATAAATGCACGCATCCCCCCCGCGAAGGGGGTCAGCGCCCGTCGG/ |
| (SEQ ID NO: 542) | 3Bio/ |
| NR_003286.2_RNA18S5_r1_2.2 | /5Biosg/CATGTATTAGCTCTAGAATTACCACAGTTATCCAAGTAGGAGAGGAGCGAGCGACCAAAG/ |
| (SEQ ID NO: 543) | 3Bio/ |
| NR_003286.2_RNA18S5_r1_3.1 | /5Biosg/GACGTTCGAATGGGTCGTCGCCGCCACGGGGGGCGTGCGATCGGCCCGAGGTTATCTAGA/ |
| (SEQ ID NO: 544) | 3Bio/ |
| NR_003286.2_RNA18S5_r1_3.2 | /5Biosg/GTCACCAAAGCCGCCGGCGCCCGCCCCCCGGCCGGGGCCGGAGAGGGGCTGACCGGGTTG/ |
| (SEQ ID NO: 545) | 3Bio/ |
| NR_003286.2_RNA18S5_r1_4.1 | /5Biosg/CTTCCTTGGATGTGGTAGCCGTTTCTCAGGCTCCCTCTCCGGAATCGAACCCTGATTCCC/ |
| (SEQ ID NO: 546) | 3Bio/ |
| NR_003286.2_RNA18S5_r1_4.2 | /5Biosg/CGTCACCCGTGGTCACCATGGTAGGCACGGCGACTACCATCGAAAGTTGATAGGGCAGAC/ |
| (SEQ ID NO: 547) | 3Bio/ |
| NR_003286.2_RNA18S5_r1_5.1 | /5Biosg/CGTTAAAGGATTTAAAGTGGACTCATTCCAATTACAGGGCCTCGAAAGAGTCCTGTATTG/ |
| (SEQ ID NO: 548) | 3Bio/ |
| NR_003286.2_RNA18S5_r1_5.2 | /5Biosg/TTATTTTTCGTCACTACCTCCCCGGGTCGGGAGTGGGTAATTTGCGCGCCTGCTGCCTTC/ |
| (SEQ ID NO: 549) | 3Bio/ |
| NR_003286.2_RNA18S5_r1_6.1 | /5Biosg/GCCCGCCCGCTCCCAAGATCCAACTACGAGCTTTTTAACTGCAGCAACTTTAATATACGC/ |
| (SEQ ID NO: 550) | 3Bio/ |
| NR_003286.2_RNA18S5_r1_6.2 | /5Biosg/TATTGGAGCTGGAATTACCGCGGCTGCTGGCACCAGACTTGCCCTCCAATGGATCCTCGT/ |
| (SEQ ID NO: 551) | 3Bio/ |
| NR_003286.2_RNA18S5_r1_7.1 | /5Biosg/ACTCTAATTTTTTCAAAGTAAACGCTTCGGGCCCCGCGGGACACTCAGCTAAGAGCATCG/ |
| (SEQ ID NO: 552) | 3Bio/ |
| NR_003286.2_RNA18S5_r1_7.2 | /5Biosg/AGGGGGCGCCGAGAGGCAAGGGGCGGGGACGGGCGGTGGCTCGCCTCGCGGCGGACCGCC/ |
| (SEQ ID NO: 553) | 3Bio/ |
| NR_003286.2_RNA18S5_r1_8.1 | /5Biosg/CCCCCGGCCGTCCCTCTTAATCATGGCCTCAGTTCCGAAAACCAACAAAATAGAACCGCG/ |
| (SEQ ID NO: 554) | 3Bio/ |
| NR_003286.2_RNA18S5_r1_8.2 | /5Biosg/GTCCTATTCCATTATTCCTAGCTGCGGTATCCAGGCGGCTCGGGCCTGCTTTGAACACTC/ |
| (SEQ ID NO: 555) | 3Bio/ |
| NR_003286.2_RNA18S5_r1_9.1 | /5Biosg/GTCTTCGAACCTCCGACTTTCGTTCTTGATTAATGAAAACATTCTTGGCAAATGCTTTCG/ |
| (SEQ ID NO: 556) | 3Bio/ |
| NR_003286.2_RNA18S5_r1_9.2 | /5Biosg/CTCTGGTCCGTCTTGCGCCGGTCCAAGAATTTCACCTCTAGCGGCGCAATACGAATGCCC/ |
| (SEQ ID NO: 557) | 3Bio/ |
| NR_003286.2_RNA18S5_r1_10.1 | /5Biosg/CCCCCCGGAACCCAAAGACTTTGGTTTCCCGGAAGCTGCCCGGCGGGTCATGGGAATAAC/ |
| (SEQ ID NO: 558) | 3Bio/ |
| NR_003286.2_RNA18S5_r1_10.2 | /5Biosg/GCCGCCGCATCGCCGGTCGGCATCGTTTATGGTCGGAACTACGACGGTATCTGATCGTCT/ |
| (SEQ ID NO: 559) | 3Bio/ |
| NR_003286.2_RNA18S5_r1_11.1 | /5Biosg/CCTGTCCGTGTCCGGGCCGGGTGAGGTTTCCCGTGTTGAGTCAAATTAAGCCGCAGGCTC/ |
| (SEQ ID NO: 560) | 3Bio/ |
| NR_003286.2_RNA18S5_r1_11.2 | /5Biosg/CACTCCTGGTGGTGCCCTTCCGTCAATTCCTTTAAGTTTCAGCTTTGCAACCATACTCCC/ |
| (SEQ ID NO: 561) | 3Bio/ |
| NR_003286.2_RNA18S5_r1_12.1 | /5Biosg/GTTAGCATGCCAGAGTCTCGTTCGTTATCGGAATTAACCAGACAAATCGCTCCACCAACT/ |
| (SEQ ID NO: 562) | 3Bio/ |
| NR_003286.2_RNA18S5_r1_12.2 | /5Biosg/AAGAACGGCCATGCACCACCACCCACGGAATCGAGAAAGAGCTATCAATCTGTCAATCCT/ |
| (SEQ ID NO: 563) | 3Bio/ |
| NR_003286.2_RNA18S5_r1_13.1 | /5Biosg/AGCCCCGGACATCTAAGGGCATCACAGACCTGTTATTGCTCAATCTCGGGTGGCTGAACG/ |
| (SEQ ID NO: 564) | 3Bio/ |
| NR_003286.2_RNA18S5_r1_13.2 | /5Biosg/CCACTTGTCCCTCTAAGAAGTTGGGGGACGCCGACCGCTCGGGGGTCGCGTAACTAGTTA/ |
| (SEQ ID NO: 565) | 3Bio/ |
| NR_003286.2_RNA18S5_r1_14.1 | /5Biosg/CGTTCATGGGGAATAATTGCAATCCCCGATCCCCATCACGAATGGGGTTCAACGGGTTAC/ |
| (SEQ ID NO: 566) | 3Bio/ |
| NR_003286.2_RNA18S5_r1_14.2 | /5Biosg/CCGCGCCTGCCGGCGTAGGGTAGGCACACGCTGAGCCAGTCAGTGTAGCGCGCGTGCAGC/ |
| (SEQ ID NO: 567) | 3Bio/ |
| NR_003286.2_RNA18S5_r1_15.1 | /5Biosg/GGGCCGATCCGAGGGCCTCACTAAACCATCCAATCGGTAGTAGCGACGGGCGGTGTGTAC/ |
| (SEQ ID NO: 568) | 3Bio/ |
| NR_003286.2_RNA18S5_r1_15.2 | /5Biosg/AAAGGGCAGGGACTTAATCAACGCAAGCTTATGACCCGCACTTACTGGGAATTCCTCGTT/ |
| (SEQ ID NO: 569) | 3Bio/ |
| NR_003286.2_RNA18S5_r1_16.1 | /5Biosg/TAATGATCCTTCCGCAGGTTCACCTACGGAAACCTTGTTACGACTTTTACTTCCTCTAGA/ |
| (SEQ ID NO: 570) | 3Bio/ |
| NR_003286.2_RNA18S5_r1_16.2 | /5Biosg/TAGTCAAGTTCGACCGTCTTCTCAGCGCTCCGCCAGGGCCGTGGGCCGACCCCGGCGGGG/ |
| (SEQ ID NO: 571) | 3Bio/ |
| NR_003287.2_RNA28S5_r1.1_1.1 | /5Biosg/TCGGCGCTGGGCTCTTCCCTGTTCACTCGCCGTTACTGAGGGAATCCTGGTTAGTTTCTT/ |
| (SEQ ID NO: 572) | 3Bio/ |
| NR_003287.2_RNA28S5_r1.1_1.2 | /5Biosg/CTCCTCCGCTGACTAATATGCTTAAATTCAGCGGGTCGCCACGTCTGATCTGAGGTCGCG/ |
| (SEQ ID NO: 573) | 3Bio/ |
| NR_003287.2_RNA28S5_r1.1_2.1 | /5Biosg/TCCACGGGCTGGGCCTCGATCAGAAGGACTTGGGCCCCCCACGAGCGGCGCCGGGGAGCG/ |
| (SEQ ID NO: 574) | 3Bio/ |
| NR_003287.2_RNA28S5_r1.1_2.2 | /5Biosg/GGTCTTCCGTACGCCACATGTCCCGCGCCCCGCCGCGGGGCGGGGATTCGGCGCTGGGCT/ |
| (SEQ ID NO: 575) | 3Bio/ |
| NR_003287.2_RNA28S5_r1.1_3.1 | /5Biosg/TAGCCTTAGATGGAGTTTACCACCCGCTTTGGGCTGCATTCCCAAGCAACCCGACTCCGG/ |
| (SEQ ID NO: 576) | 3Bio/ |
| NR_003287.2_RNA28S5_r1.1_3.2 | /5Biosg/GAAGACCCGGGCCCGGCGCGCCGGGGGCCGCTACCGGCCTCACACCGTCCACGGGCTGGG/ |
| (SEQ ID NO: 577) | 3Bio/ |
| NR_003287.2_RNA28S5_r1.1_4.1 | /5Biosg/CACCCGTTTACCTCTTAACGGTTTCACGCCCTCTTGAACTCTCTCTTCAAAGTTCTTTTC/ |
| (SEQ ID NO: 578) | 3Bio/ |
| NR_003287.2_RNA28S5_r1.1_4.2 | /5Biosg/AACTTTCCCTTACGGTACTTGTTGACTATCGGTCTCGTGCCGGTATTTAGCCTTAGATGG/ |
| (SEQ ID NO: 579) | 3Bio/ |
| NR_003287.2_RNA28S5_r1.1_5.1 | /5Biosg/CGGGTGGAGGGGTCGGGAGGAACGGGGGGCGGGAAAGATCCGCCGGGCCGCCGACACGGC/ |
| (SEQ ID NO: 580) | 3Bio/ |
| NR_003287.2_RNA28S5_r1.1_5.2 | /5Biosg/CGGACCCGCCGCCGGGTTGAATCCTCCGGGCGGACTGCGCGGACCCCACCCGTTTACCTC/ |
| (SEQ ID NO: 581) | 3Bio/ |
| NR_003287.2_RNA28S5_r1.1_7.1 | /5Biosg/CCCCCCGAGCCACCTTCCCCGCCGGGCCTTCCCAGCCGTCCCGGAGCCGGTCGCGGCGCA/ |
| (SEQ ID NO: 582) | 3Bio/ |
| NR_003287.2_RNA28S5_r1.1_7.2 | /5Biosg/CCGCCGCGGTGGAAATGCGCCCGGCGGCGGCCGGTCGCCGGTCGGGGGACGGTCCCCCGC/ |
| (SEQ ID NO: 583) | 3Bio/ |
| NR_003287.2_RNA28S5_r1.2_1.1 | /5Biosg/GAGGGGGGAGAGCGCGGCGACGGGTCTCGCTCCCTCGGCCCCGGGATTCGGCGAGTGCTG/ |
| (SEQ ID NO: 584) | 3Bio/ |
| NR_003287.2_RNA28S5_r1.2_1.2 | /5Biosg/CTGCCGGGGGGGCTGTAACACTCGGGGGGGGTTTCGGTCCCGCCGCCGCCGCCGCCGCCG/ |
| (SEQ ID NO: 585) | 3Bio/ |
| NR_003287.2_RNA28S5_r1.2_4.1 | /5Biosg/GCACGTGTTAGACTCCTTGGTCCGTGTTTCAAGACGGGTCGGGTGGGTAGCCGACGTCGC/ |
| (SEQ ID NO: 586) | 3Bio/ |
| NR_003287.2_RNA28S5_r1.2_4.2 | /5Biosg/CGCCGACCCCGTGCGCTCGCTCCGCCGTCCCCCTCTTCGGGGGACGCGCGCGTGGCCCCG/ |
| (SEQ ID NO: 587) | 3Bio/ |
| NR_003287.2_RNA28S5_r1.2_5.1 | /5Biosg/CGGGCCGGTGGTGCGCCCTCGGCGGACTGGAGAGGCCTCGGGATCCCACCTCGGCCGGCG/ |
| (SEQ ID NO: 588) | 3Bio/ |
| NR_003287.2_RNA28S5_r1.2_5.2 | /5Biosg/AGCGCGCCGGCCTTCACCTTCATTGCGCCACGGCGGCTTTCGTGCGAGCCCCCGACTCGC/ |
| (SEQ ID NO: 589) | 3Bio/ |
| NR_003287.2_RNA28S5_r1.2_6.1 | /5Biosg/GGACCGCTACGGACCTCCACCAGAGTTTCCTCTGGCTTCGCCCTGCCCAGGCATAGTTCA/ |
| (SEQ ID NO: 590) | 3Bio/ |
| NR_003287.2_RNA28S5_r1.2_6.2 | /5Biosg/CCATCTTTCGGGTCCTAACACGTGCGCTCGTGCTCCACCTCCCCGGCGCGGCGGGCGAGA/ |
| (SEQ ID NO: 591) | 3Bio/ |
| NR_003287.2_RNA28S5_r1.2_7.1 | /5Biosg/TGCGTCGGGTCTGCGAGAGCGCCAGCTATCCTGAGGGAAACTTCGGAGGGAACCAGCTAC/ |
| (SEQ ID NO: 592) | 3Bio/ |
| NR_003287.2_RNA28S5_r1.2_7.2 | /5Biosg/TAGATGGTTCGATTAGTCTTTCGCCCCTATACCCAGGTCGGACGACCGATTTGCACGTCA/ |
| (SEQ ID NO: 593) | 3Bio/ |
| NR_003287.2_RNA28S5_r1.2_8.1 | /5Biosg/CCGGCTCCACGCCAGCGAGCCGGGCTTCTTACCCATTTAAAGTTTGAGAATAGGTTGAGA/ |
| (SEQ ID NO: 594) | 3Bio/ |
| NR_003287.2_RNA28S5_r1.2_8.2 | /5Biosg/TCGTTTCGGCCCCAAGACCTCTAATCATTCGCTTTACCGGATAAAACTGCGTGGCGGGGG/ |
| (SEQ ID NO: 595) | 3Bio/ |
| NR_003287.2_RNA28S5_r1.2_9.1 | /5Biosg/AACACCTTTTCTGGGGTCTGATGAGCGTCGGCATCGGGCGCCTTAACCCGGCGTTCGGTT/ |
| (SEQ ID NO: 596) | 3Bio/ |
| NR_003287.2_RNA28S5_r1.2_9.2 | /5Biosg/CATCCCGCAGCGCCAGTTCTGCTTACCAAAAGTGGCCCACTAGGCACTCGCATTCCACGC/ |
| (SEQ ID NO: 597) | 3Bio/ |
| NR_003287.2_RNA28S5_r1.2_10.1 | /5Biosg/ATGGGCCCGACGCTCCAGCGCCATCCATTTTCAGGGCTAGTTGATTCGGCAGGTGAGTTG/ |
| (SEQ ID NO: 598) | 3Bio/ |
| NR_003287.2_RNA28S5_r1.2_10.2 | /5Biosg/TTACACACTCCTTAGCGGATTCCGACTTCCATGGCCACCGTCCTGCTGTCTATATCAACC/ |
| (SEQ ID NO: 599) | 3Bio/ |
| NR_003287.2_RNA28S5_r1.2_11.1 | /5Biosg/GAAGGACCCCACACCCCCGCCGCCGCCGCCGCCGCCGCCCTCCGACGCACACCACACGCG/ |
| (SEQ ID NO: 600) | 3Bio/ |
| NR_003287.2_RNA28S5_r1.2_11.2 | /5Biosg/CGCGCGCGCGCGCCGCCCCCGCCGCTCCCGTCCACTCTCGACTGCCGGCGACGGCCGGGT/ |
| (SEQ ID NO: 601) | 3Bio/ |
| NR_003287.2_RNA28S5_r1.2_12.1 | /5Biosg/GCTTCAAGGCTCACCGCAGCGGCCCTCCTACTCGTCGCGGCGTAGCGTCCGCGGGGCTCC/ |
| (SEQ ID NO: 602) | 3Bio/ |
| NR_003287.2_RNA28S5_r1.2_12.2 | /5Biosg/GGGGGCGGGGAGCGGGGCGTGGGCGGGAGGAGGGGAGGAGGCGTGGGGGGGGGGGCGGGG/ |
| (SEQ ID NO: 603) | 3Bio/ |
| NR_003287.2_RNA28S5_r1.2_13.1 | /5Biosg/GTTCAACTGCTGTTCACATGGAACCCTTCTCCACTTCGGCCTTCAAAGTTCTCGTTTGAA/ |
| (SEQ ID NO: 604) | 3Bio/ |
| NR_003287.2_RNA28S5_r1.2_13.2 | /5Biosg/TATTTGCTACTACCACCAAGATCTGCACCTGCGGCGGCTCCACCCGGGCCCGCGCCCTAG/ |
| (SEQ ID NO: 605) | 3Bio/ |
| NR_003287.2_RNA28S5_r1.2_14.1 | /5Biosg/CCGCCACTCCGGATTCGGGGATCTGAACCCGACTCCCTTTCGATCGGCCGAGGGCAACGG/ |
| (SEQ ID NO: 606) | 3Bio/ |
| NR_003287.2_RNA28S5_r1.2_14.2 | /5Biosg/AGGCCATCGCCCGTCCCTTCGGAACGGCGCTCGCCCATCTCTCAGGACCGACTGACCCAT/ |
| (SEQ ID NO: 607) | 3Bio/ |
| NR_003287.2_RNA28S5_r1.2_15.1 | /5Biosg/GGCGAACCCATTCCAGGGCGCCCTGCCCTTCACAAAGAAAAGAGAACTCTCCCCGGGGCT/ |
| (SEQ ID NO: 608) | 3Bio/ |
| NR_003287.2_RNA28S5_r1.2_15.2 | /5Biosg/CCCGCCGGCTTCTCCGGGATCGGTCGCGTTACCGCACTGGACGCCTCGCGGCGCCCATCT/ |
| (SEQ ID NO: 609) | 3Bio/ |
| NR_003287.2_RNA28S5_r1.2_16.1 | /5Biosg/ATATGGGTACGGCCCGGCGCGAGATTTACACCCTCTCCCCCGGATTTTCAAGGGCCAGCG/ |
| (SEQ ID NO: 610) | 3Bio/ |
| NR_003287.2_RNA28S5_r1.2_16.2 | /5Biosg/AGAGCTCACCGGACGCCGCCGGAACCGCGACGCTTTCCAAGGCACGGGCCCCTCTCTCGG/ |
| (SEQ ID NO: 611) | 3Bio/ |
| NR_003287.2_RNA28S5_r1.2_17.1 | /5Biosg/CGACCGACCCAGCCCTTAGAGCCAATCCTTATCCCGAAGTTACGGATCCGGCTTGCCGAC/ |
| (SEQ ID NO: 612) | 3Bio/ |
| NR_003287.2_RNA28S5_r1.2_17.2 | /5Biosg/TTCCCTTACCTACATTGTTCCAACATGCCAGAGGCTGTTCACCTTGGAGACCTGCTGCGG/ |
| (SEQ ID NO: 613) | 3Bio/ |
| NR_003287.2_RNA28S5_r1.2_19.1 | /5Biosg/GCCCCTGCCGCCCCGACCCTTCTCCCCCCGCCGCCGCCCCCACGCGGCGCTCCCCCGGGG/ |
| (SEQ ID NO: 614) | 3Bio/ |
| NR_003287.2_RNA28S5_r1.2_19.2 | /5Biosg/AGGGGGGAGGACGGGGAGCGGGGGAGAGAGAGAGAGAGAGGGCGCGGGGCGGGGAGGGAG/ |
| (SEQ ID NO: 615) | 3Bio/ |
| NR_003287.2_RNA28S5_r1.2_23.1 | /5Biosg/TTCCCCTGGTCCGCACCAGTTCTAAGTCGGCTGCTAGGCGCCGGCCGAGGCGAGGCGCCG/ |
| (SEQ ID NO: 616) | 3Bio/ |
| NR_003287.2_RNA28S5_r1.2_23.2 | /5Biosg/CGCGGAACCGCGGCCCCGGGGGCGGACCCGGCGGGGGGGACCGGCCCGCGGCCCCTCCGC/ |
| (SEQ ID NO: 617) | 3Bio/ |
| NR_003287.2_RNA28S5_r1.2_24.1 | /5Biosg/CGTTTACCCGCGCTTCATTGAATTTCTTCACTTTGACATTCAGAGCACTGGGCAGAAATC/ |
| (SEQ ID NO: 618) | 3Bio/ |
| NR_003287.2_RNA28S5_r1.2_24.2 | /5Biosg/ACATCGCGTCAACACCCGCCGCGGGCCTTCGCGATGCTTTGTTTTAATTAAACAGTCGGA/ |
| (SEQ ID NO: 619) | 3Bio/ |
| NR_003287.2_RNA28S5_r1.2_25.1 | /5Biosg/GGCTGTGGTTTCGCTGGATAGTAGGTAGGGACAGTGGGAATCTCGTTCATCCATTCATGC/ |
| (SEQ ID NO: 620) | 3Bio/ |
| NR_003287.2_RNA28S5_r1.2_25.2 | /5Biosg/GCGTCACTAATTAGATGACGAGGCATTTGGCTACCTTAAGAGAGTCATAGTTACTCCCGC/ |
| (SEQ ID NO: 621) | 3Bio/ |
| NR_003287.2_RNA28S5_r1.2_26.1 | /5Biosg/GGGGGGGCGCCGGGGGCCTCCCACTTATTCTACACCTCTCATGTCTCTTCACCGTGCCAG/ |
| (SEQ ID NO: 622) | 3Bio/ |
| NR_003287.2_RNA28S5_r1.2_26.2 | /5Biosg/ACTAGAGTCAAGCTCAACAGGGTCTTCTTTCCCCGCTGATTCCGCCAAGCCCGTTCCCTT/ |
| (SEQ ID NO: 623) | 3Bio/ |
| NR_003287.2_RNA28S5_r1.2_27.1 | /5Biosg/GCCCCTCGGGGCTCGCCCCCCCGCCTCACCGGGTCAGTGAAAAAACGATCAGAGTAGTGG/ |
| (SEQ ID NO: 624) | 3Bio/ |
| NR_003287.2_RNA28S5_r1.2_27.2 | /5Biosg/TATTTCACCGGCGGCCCGCAGGGCCGGCGGACCCCGCCCCGGGCCCCTCGCGGGGACACC/ |
| (SEQ ID NO: 625) | 3Bio/ |
| NR_003287.2_RNA28S5_r1.2_28.1 | /5Biosg/GACACCTGCGTTACCGTTTGACAGGTGTACCGCCCCAGTCAAACTCCCCACCTGGCACTG/ |
| (SEQ ID NO: 626) | 3Bio/ |
| NR_003287.2_RNA28S5_r1.2_28.2 | /5Biosg/TCCCCGGAGCGGGTCGCGCCCGGCCGGCGCGCGGCCGGGCGCTTGGCGCCAGAAGCGAGA/ |
| (SEQ ID NO: 627) | 3Bio/ |
| NR_003287.2_RNA28S5_r1.2_29.1 | /5Biosg/GGTCAGAAGGATCGTGAGGCCCCGCTTTCACGGTCTGTATTCGTACTGAAAATCAAGATC/ |
| (SEQ ID NO: 628) | 3Bio/ |
| NR_003287.2_RNA28S5_r1.2_29.2 | /5Biosg/AAGCGAGCTTTTGCCCTTCTGCTCCACGGGAGGTTTCTGTCCTCCCTGAGCTCGCCTTAG/ |
| (SEQ ID NO: 629) | 3Bio/ |
| NR_003287.2_RNA28S5_r1.2_30.1 | /5Biosg/CAATGATAGGAAGAGCCGACATCGAAGGATCAAAAAGCGACGTCGCTATGAACGCTTGGC/ |
| (SEQ ID NO: 630) | 3Bio/ |
| NR_003287.2_RNA28S5_r1.2_30.2 | /5Biosg/CGCCACAAGCCAGTTATCCCTGTGGTAACTTTTCTGACACCTCCTGCTTAAAACCCAAAA/ |
| (SEQ ID NO: 631) | 3Bio/ |
| NR_003287.2_RNA28S5_r1.2_31.1 | /5Biosg/TTACCATGGCAACAACACATCATCAGTAGGGTAAAACTAACCTGTCTCACGACGGTCTAA/ |
| (SEQ ID NO: 632) | 3Bio/ |
| NR_003287.2_RNA28S5_r1.2_31.2 | /5Biosg/ACCCAGCTCACGTTCCCTATTAGTGGGTGAACAATCCAACGCTTGGTGAATTCTGCTTCA/ |
| (SEQ ID NO: 633) | 3Bio/ |
| NR_003287.2_RNA28S5_r1.2_32.1 | /5Biosg/GATTCTGACTTAGAGGCGTTCAGTCATAATCCCACAGATGGTAGCTTCGCCCCATTGGCT/ |
| (SEQ ID NO: 634) | 3Bio/ |
| NR_003287.2_RNA28S5_r1.2_32.2 | /5Biosg/CCTCAGCCAAGCACATACACCAAATGTCTGAACCTGCGGTTCCTCTCGTACTGAGCAGGA/ |
| (SEQ ID NO: 635) | 3Bio/ |
| NR_003287.2_RNA28S5_r1.2_33.1 | /5Biosg/TCCCGCGCGCGCGGGGCGCGTGGAGGGGGGGGGCGGCCCGCCGGCGGGGACAGGCGGGGG/ |
| (SEQ ID NO: 636) | 3Bio/ |
| NR_003287.2_RNA28S5_r1.2_33.2 | /5Biosg/ACCGGCTATCCGAGGCCAACCGAGGCTCCGCGGCGCTGCCGTATCGTTCCGCCTGGGCGG/ |
| (SEQ ID NO: 637) | 3Bio/ |
| NR_003287.2_RNA28S5_r1.2_34.1 | /5Biosg/ACGAACGTGCGGTGCGTGACGGGCGAGGGGGCGGCCGCCTCTCCGGCCGCGCCCCGTTTC/ |
| (SEQ ID NO: 638) | 3Bio/ |
| NR_003287.2_RNA28S5_r1.2_34.2 | /5Biosg/CCAGGACGAAGGGCACTCCGCACCGGACCCCGGTCCCGGCGCGCGGCGGGGCACGCGCCC/ |
| (SEQ ID NO: 639) | 3Bio/ |
| NR_003287.2_RNA28S5_r1.2_35.1 | /5Biosg/GACAAACCCTTGTGTCGAGGGCTGACTTTCAATAGATCGCAGCGAGGGAGCTGCTCTGCT/ |
| (SEQ ID NO: 640) | 3Bio/ |
| NR_003287.2_RNA28S5_r1.2_35.2 | /5Biosg/ACGTACGAAACCCCGACCCAGAAGCAGGTCGTCTACGAATGGTTTAGCGCCAGGTTCCCC/ |
| (SEQ ID NO: 641) | 3Bio/ |
| NR_003285.2_RNA5-8S_MB1.1 | /5Biosg/CGGGAGGAACCCGGGGCCGCAAGTGCGTTCGAAGTGTCGATGATCAATGTGTCCTGCAAT/ |
| (SEQ ID NO: 642) | 3Bio/ |
| NR_003285.2_RNA5-8S_MB1.2 | /5Biosg/TCACATTAATTCTCGCAGCTAGCTGCGTTCTTCATCGACGCACGAGCCGAGTGATCCACC/ |
| (SEQ ID NO: 643) | 3Bio/ |
| NR_023363.1_RNA5S_MB1.1 | /5Biosg/AAGCCTACAGCACCCGGTATTCCCAGGCGGTCTCCCATCCAAGTACTAACCAGGCCCGAC/ |
| (SEQ ID NO: 644) | 3Bio/ |
| NR_023363.1_RNA5S_MB1.2 | /5Biosg/CCTGCTTAGCTTCCGAGATCAGACGAGATCGGGCGCGTTCAGGGTGGTATGGCCGTAGAC/ |
| (SEQ ID NO: 645) | 3Bio/ |

APPENDIX 7
Human ribosoinai protein genes
Gene Listing (79):

| | |
|---|---|
| RPLP0 | NM_001002 |
| RPLP1 | NM_001003 |
| RPLP2 | NM_001004 |
| RPL3 | NM_000967 |
| RPL4 | NM_000968 |
| RPL5 | NM_000969 |
| RPL6 | NM_000970 |
| RPL7 | NM_000971 |
| RPL7A | NM_000972 |
| RPL8 | NM_000973 |
| RPL9 | NM_000661 |
| RPL10 | NM_006013 |
| RPL10A | NM_007104 |
| RPL11 | NM_000975 |
| RPL12 | NM_000976 |
| RPL13 | NM_033251 |
| RPL13A | NM_012423 |
| RPL14 | NM_003973 |
| RPL15 | NM_002948 |
| RPL17 | NM_000985 |
| RPL18 | NM_000979 |
| RPL19 | NM_000981 |
| MRPL20 | NM_017971 |
| RPL21 | NM_000982 |
| RPL22 | NM_000983 |
| RPL23 | NM_000978 |
| RPL23A | NM_000984 |
| RPL24 | NM_000986 |
| RPL26 | NM_000987 |
| RPL27 | NM_000988 |
| RPL27A | NM_000990 |
| RPL28 | NM_000991 |
| RPL29 | NM_000992 |
| RPL30 | NM_000989 |
| RPL31 | NM_000993 |
| RPL32 | NM_000994 |
| RPL34 | NM_000995 |
| RPL35 | NM_007209 |
| RPL36 | NM_033643 |
| RPL36A | NM_021029 |
| RPL37 | NM_000997 |
| RPL37A | NM_000998 |
| RPL38 | NM_000999 |
| RPL39 | NM_001000 |
| RPL41 | NM_021104 |
| MRPL41 | NM_032477 |
| RPSA | NM_002295 |
| RPS2 | NM_002952 |
| RPS3 | NM_001005 |
| RPS3A | NM_001006 |
| RPS4X | NM_001007 |
| RPS4Y | NM_001008 |
| RPS5 | NM_001009 |
| RPS6 | NM_001010 |
| RPS7 | NM_001011 |
| RPS8 | NM_001012 |
| RPS9 | NM_001013 |
| RPS10 | NM_001014 |
| RPS11 | NM_001015 |
| RPS12 | NM_001016 |
| RPS13 | NM_001017 |
| RPS14 | NM_005617 |
| RPS15 | NM_001018 |
| RPS15A | NM_001019 |
| RPS16 | NM_001020 |
| RPS17 | NM_001021 |
| RPS18 | NM_022551 |
| MRPS18A | NM_018135 |
| RPS19 | NM_001022 |
| RPS20 | NM_001023 |
| RPS21 | NM_001024 |
| RPS23 | NM_001025 |
| RPS24 | NM_001026 |
| RPS25 | NM_001028 |
| RPS26 | NM_001029 |
| RPS27 | NM_001030 |
| RPS27A | NM_002954 |
| RPS28 | NM_001031 |
| RPS29 | NM_001032 |

LOCUS NM_001002 1229 bp mRNA linear PRI 10-JAN-2014
DEFINITION Homo sapiens ribosomal protein, large, P0 (RPLP0), transcript
variant 1, mRNA. (SEQ ID NO: 646)

| | |
|---|---|
| 1 | gtctgacggg cgatggcgca gccaatagac aggagcgcta tccgcggttt ctgattggct |
| 61 | actttgttcg cattataaaa ggcacgcgcg ggcgcgaggc ccttctctcg ccaggcgtcc |
| 121 | tcgtggaagt gacatcgtct ttaaaccctg cgtggcaatc cctgacgcac cgccgtgatg |
| 181 | cccagggaag acagggcgac ctggaagtcc aactacttcc ttaagatcat ccaactattg |
| 241 | gatgattatc cgaaatgttt cattgtggga gcagacaatg tgggctccaa gcagatgcag |
| 301 | cagatccgca tgtcccttcg cgggaaggct gtggtgctga tgggcaagaa caccatgatg |
| 361 | cgcaaggcca tccgagggca cctggaaaac aacccagctc tggagaaact gctgcctcat |
| 421 | atccggggga atgtgggctt tgtgttcacc aaggaggacc tcactgagat cagggacatg |
| 481 | ttgctggcca ataaggtgcc agctgctgcc cgtgctggtg ccattgcccc atgtgaagtc |
| 541 | actgtgccag cccagaacac tggtctcggg cccgagaaga cctccttttt ccaggcttta |
| 601 | ggtatcacca ctaaaatctc caggggcacc attgaaatcc tgagtgatgt gcagctgatc |
| 661 | aagactggag acaaagtggg agccagcgaa gccacgctgc tgaacatgct caacatctcc |
| 721 | cccttctcct ttgggctggt catccagcag gtgttcgaca atggcagcat ctacaaccct |
| 781 | gaagtgcttg atatcacaga ggaaactctg cattctcgct tcctggaggg tgtccgcaat |
| 841 | gttgccagtg tctgtctgca gattggctac ccaactgttg catcagtacc ccattctatc |
| 901 | atcaacgggt acaaacgagt cctggccttg tctgtggaga cggattacac cttcccactt |
| 961 | gctgaaaagg tcaaggcctt cttggctgat ccatctgcct ttgtggctgc tgcccctgtg |
| 1021 | gctgctgcca ccacagctgc tcctgctgct gctgcagccc cagctaaggt tgaagccaag |
| 1081 | gaagagtcgg aggagtcgga cgaggatatg ggatttggtc tctttgacta atcaccaaaa |
| 1141 | agcaaccaac ttagccagtt ttatttgcaa aacaaggaaa taaaggctta cttctttaaa |
| 1201 | aagtaaaaaa |

LOCUS NM_001003 512 bp mRNA linear PRI 11-JAN-2014
DEFINITION Homo sapiens ribosomal protein, large, P1 (RPLP1), transcript
variant 1, mRNA. (SEQ ID NO: 647)

| | |
|---|---|
| 1 | cctttcctca gctgccgcca aggtgctcgg tccttccgag gaagctaagg ctgcgttggg |
| 61 | gtgaggccct cacttcatcc ggcgactagc accgcgtccg gcagcgccag ccctacactc |
| 121 | gcccgcgcca tggcctctgt ctccgagctc gcctgcatct actcggccct cattctgcac |
| 181 | gacgatgagg tgacagtcac ggaggataag atcaatgccc tcattaaagc agccggtgta |
| 241 | aatgttgagc ctttttggcc tggcttgttt gcaaaggccc tggccaacgt caacattggg |
| 301 | agcctcatct gcaatgtagg ggccggtgga cctgctccag cagctggtgc tgcaccagca |
| 361 | ggaggtcctg ccccctccac tgctgctgct ccagctgagg agaagaaagt ggaagcaaag |
| 421 | aaagaagaat ccgaggagtc tgatgatgac atgggctttg gtctttttga ctaaacctct |
| 481 | tttataacat gttcaataaa aagctgaact tt |

LOCUS NM_001004 511 bp mRNA linear PRI 24-NOV-2013
DEFINITION Homo sapiens ribosomal protein, large, P2 (RPLP2), mRNA.
(SEQ ID NO: 648)

| | |
|---|---|
| 1 | ggtttaaccc cgcctcttgc gtcggcgcct tccttttcct ccctgtcgcc accgaggtcg |
| 61 | cacgcgtgag acttctccgc cgcctccgcc gcagacgccg ccgcgatgcg ctacgtcgcc |
| 121 | tcctacctgc tggctgccct agggggcaac tcctccccca gcgccaagga catcaagaag |
| 181 | atcttggaca gcgtgggtat cgaggcggac gacgaccggc tcaacaaggt tatcagtgag |
| 241 | ctgaatggaa aaaacattga agacgtcatt gcccagggta ttggcaagct tgccagtgta |
| 301 | cctgctggtg gggctgtagc cgtctctgct gccccaggct ctgcagcccc tgctgctggt |
| 361 | tctgcccctg ctgcagcaga ggagaagaaa gatgagaaga aggaggagtc tgaagagtca |
| 421 | gatgatgaca tgggatttgg cctttttgat taaattcctg ctcccctgca aataaagcct |
| 481 | ttttacacat ctcaa |

LOCUS NM_000967 1348 bp mRNA linear PRI 10-JAN-2014
DEFINITION Homo sapiens ribosomal protein L3 (RPL3), transcript variant 1,
mRNA. (SEQ ID NO: 649)

| | |
|---|---|
| 1 | ccagatttgg ctttatatag cggacccgta aggccgaccg gcctctaccg gcgggatttg |
| 61 | atggcgtgat gtctcacaga aagttctccg ctcccagaca tgggtccctc ggcttcctgc |
| 121 | ctcggaagcg cagcagcagg catcgtggga aggtgaagag cttccctaag gatgacccgt |
| 181 | ccaagccggt ccacctcaca gccttcctgg gatacaaggc tggcatgact cacatcgtgc |
| 241 | gggaagtcga caggccggga tccaaggtga acaagaagga ggtggtggag gctgtgacca |
| 301 | ttgtagagac accacccatg gtggttgtgg gcattgtggg ctacgtggaa acccctcgag |
| 361 | gcctccggac cttcaagact gtctttgctg agcacatcag tgatgaatgc aagaggcgtt |
| 421 | tctataagaa ttggcataaa tctaagaaga aggcctttac caagtactgc aagaaatggc |
| 481 | aggatgagga tggcaagaag cagctggaga aggacttcag cagcatgaag aagtactgcc |
| 541 | aagtcatccg tgtcattgcc cacacccaga tgcgcctgct tcctctgcgc cagaagaagg |
| 601 | cccacctgat ggagatccag gtgaacggag gcactgtggc cgagaagctg gactgggccc |
| 661 | gcgagaggct tgagcagcag gtacctgtga accaagtgtt tgggcaggat gagatgatcg |
| 721 | acgtcatcgg ggtgaccaag ggcaaaggct acaaaggggt caccagtcgt tggcacacca |
| 781 | agaagctgcc ccgcaagacc caccgaggcc tgcgcaaggt ggcctgtatt ggggcatggc |
| 841 | atcctgctcg tgtagccttc tctgtggcac gcgctgggca gaaaggctac catcaccgca |
| 901 | ctgagatcaa caagaagatt tataagattg gccagggcta ccttatcaag gacggcaagc |
| 961 | tgatcaagaa caatgcctcc actgactatg acctatctga caagagcatc aaccctctgg |
| 1021 | gtggctttgt ccactatggt gaagtgacca atgactttgt catgctgaaa ggctgtgtgg |
| 1081 | tgggaaccaa gaagcgggtg ctcaccctcc gcaagtcctt gctggtgcag acgaagcggc |
| 1141 | gggctctgga gaagattgac cttaagttca ttgacaccac ctccaagttt ggccatggcc |
| 1201 | gcttccagac catggaggag aagaaagcat tcatgggacc actgaagaaa gaccgaattg |
| 1261 | caaaggaaga aggagcttaa tgccaggaac agattttgca gttggtgggg tctcaataaa |
| 1321 | agttattttc cactgacaaa |

LOCUS NM_000968 1458 bp mRNA linear PRI 10-JAN-2014
DEFINITION Homo sapiens ribosomal protein L4 (RPL4), mRNA. (SEQ ID NO: 650)

| | |
|---|---|
| 1 | aagcacttcc ttttcctgtg gcagcagccg ggctgagagg agcgtggctg tctcctctct |
| 61 | ccgccatggc gtgtgctcgc ccactgatat cggtgtactc cgaaaagggg gagtcatctg |
| 121 | gcaaaaatgt cactttgcct gctgtattca aggctcctat tcgaccagat attgtgaact |
| 181 | ttgttcacac caacttgcgc aaaaacaaca gacagcccta tgctgtcagt gaattagcag |
| 241 | gtcatcagac tagtgctgag tcttggggta ctggcagagc tgtggctcga attcccagag |
| 301 | ttcgaggtgg tgggactcac cgctctggcc agggtgcttt tggaaacatg tgtcgtggag |
| 361 | gccgaatgtt tgcaccaacc aaaacctggc gccgttggca tcgtagagtg aacacaaccc |
| 421 | aaaaacgata cgccatctgt tctgccctgg ctgcctcagc cctaccagca ctggtcatgt |
| 481 | ctaaaggtca tcgtattgag gaagttcctg aacttccttt ggtagttgaa gataaagttg |
| 541 | aaggctacaa gaagaccaag gaagctgttt tgctccttaa gaaacttaaa gcctggaatg |
| 601 | atatcaaaaa ggtctatgcc tctcagcgaa tgagagctgg caaaggcaaa atgagaaacc |
| 661 | gtcgccgtat ccagcgcagg ggcccgtgca tcatctataa tgaggataat ggtatcatca |
| 721 | aggccttcag aaacatccct ggaattactc tgcttaatgt aagcaagctg aacattttga |
| 781 | agcttgctcc tggtgggcat gtgggacgtt tctgcatttg gactgaaagt gctttccgga |
| 841 | agttagatga attgtacggc acttggcgta aagccgcttc cctcaagagt aactacaatc |
| 901 | ttcccatgca caagatgatt aatacagatc ttagcagaat cttgaaaagc ccagagatcc |
| 961 | aaagagccct tcgagcacca cgcaagaaga tccatcgcag agtcctaaag aagaacccac |
| 1021 | tgaaaaactt gagaatcatg ttgaagctaa acccatatgc aaagaccatg cgccggaaca |
| 1081 | ccattcttcg ccaggccagg aatcacaagc tccgggtgga taaggcagct gctgcagcag |
| 1141 | cggcactaca agccaaatca gatgagaagg cggcggttgc aggcaagaag cctgtggtag |
| 1201 | gtaagaaagg aaagaaggct gctgttggtg ttaagaagca gaagaagcct ctggtgggaa |
| 1261 | aaaaggcagc agctaccaag aaaccagccc ctgaaaagaa gcctgcagag aagaaaccta |
| 1321 | ctacagagga gaagaagcct gctgcataaa ctcttaaatt tgattattcc ataaaggtca |
| 1381 | aatcattttg gacagcttct tttgaataaa gacctgatta tacaggcagt gagaaacatg |

LOCUS NM_000969 1035 bp mRNA linear PRI 18-JAN-2014
DEFINITION Homo sapiens ribosomal protein L5 (RPL5), mRNA. (SEQ ID NO: 651)

| | |
|---|---|
| 1 | ggcccttttc ccacccccta gcgccgctgg gcctgcaggt ctctgtcgag cagcggacgc |
| 61 | cggtctctgt tccgcaggat ggggtttgtt aaagttgtta agaataaggc ctactttaag |
| 121 | agataccaag tgaaatttag aagacgacga gagggtaaaa ctgattatta tgctcggaaa |
| 181 | cgcttggtga tacaagataa aaataaatac aacacaccca aatacaggat gatagttcgt |
| 241 | gtgacaaaca gagacatcat ttgtcagatt gcttatgccc gtatagaggg ggatatgata |
| 301 | gtctgcgcag cgtatgcaca cgaaccgcca aaatatggtg tgaaggttgg cctgacaaat |
| 361 | tatgctgcag catattgtac tggcctgctg ctggcccgca ggcctctcaa taggtttggc |
| 421 | atggacaaga tctatgaagg ccaagtggag gtgactggtg atgaatacaa tgtggaaagc |
| 481 | attgatggtc agccaggtgc cttcacctgc tatttggatg caggccttgc cagaactacc |
| 541 | actggcaata aagtttttgg tgccctgaag ggagctgtgg atggaggctt gtctatccct |
| 601 | cacagtacca aacgattccc tggttatgat tctgaaagca aggaatttaa tgcagaagta |
| 661 | catcggaagc acatcatggg ccagaatgtt gcagattaca tgcgctactt aatggaagaa |
| 721 | gatgaagatg cttacaagaa acagttctct caatacataa agaacagcgt aactccagac |
| 781 | atgatggagg agatgtataa gaaagctcat gctgctatac gagagaatcc agtctatgaa |
| 841 | aagaagccca agaaagaagt taaaaagaag aggtggaacc gtcccaaaat gtcccttgct |
| 901 | cagaagaagg atcgggtagc tcaaaagaag gcaagcttcc tcagagctca ggagcgggct |
| 961 | gctgagagct aaacccagca attttctatg attttttcag atatagataa taaacttatg |
| 1021 | aacagcaact aaaaa |

LOCUS NM_000970 972 bp mRNA linear PRI 26-JAN-2014
DEFINITION Homo sapiens ribosomal protein L6 (RPL6), transcript variant 2,
mRNA. (SEQ ID NO: 652)

| | |
|---|---|
| 1 | gattgcttat agaccggaag ccgggacctt aattctcttt cccatcttgc aagatggcgg |
| 61 | gtgaaaaagt tgagaagcca gatactaaag agaagaaacc cgaagccaag aaggttgatg |
| 121 | ctggtggcaa ggtgaaaaag ggtaacctca aagctaaaaa gcccaagaag gggaagcccc |
| 181 | attgcagccg caaccctgtc cttgtcagag gaattggcag gtattcccga tctgccatgt |
| 241 | attccagaaa ggccatgtac aagaggaagt actcagccgc taaatccaag gttgaaaaga |
| 301 | aaaagaagga gaaggttctc gcaactgtta caaaaccagt tggtggtgac aagaacggcg |
| 361 | gtacccgggt ggttaaactt cgcaaaatgc ctagatatta tcctactgaa gatgtgcctc |
| 421 | gaaagctgtt gagccacggc aaaaaaccct tcagtcagca cgtgagaaaa ctgcgagcca |
| 481 | gcattacccc cgggaccatt ctgatcatcc tcactggacg ccacaggggc aagagggtgg |
| 541 | ttttcctgaa gcagctggct agtggcttat tacttgtgac tggacctctg gtcctcaatc |
| 601 | gagttcctct acgaagaaca caccagaaat ttgtcattgc cacttcaacc aaaatcgata |
| 661 | tcagcaatgt aaaaatccca aaacatctta ctgatgctta cttcaagaag aagaagctgc |
| 721 | ggaagcccag acaccaggaa ggtgagatct tcgacacaga aaaagagaaa tatgagatta |
| 781 | cggagcagcg caagattgat cagaaagctg tggactcaca aattttacca aaaatcaaag |
| 841 | ctattcctca gctccagggc tacctgcgat ctgtgtttgc tctgacgaat ggaatttatc |
| 901 | ctcacaaatt ggtgttctaa atgtcttaag aacctaatta aatagctgac tacaaaaaaa |

LOCUS NM_000971 866 bp mRNA linear PRI 10-JAN-2014
DEFINITION Homo sapiens ribosomal protein L7 (RPL7), mRNA. (SEQ ID NO: 653)

| | |
|---|---|
| 1 | tcctcttttt ccggctggaa ccatggaggg tgtagaagag aagaagaagg aggttcctgc |
| 61 | tgtgccagaa acccttaaga aaaagcgaag gaatttcgca gagctgaaga tcaagcgcct |
| 121 | gagaaagaag tttgcccaaa agatgcttcg aaaggcaagg aggaagctta tctatgaaaa |
| 181 | agcaaagcac tatcacaagg aatataggca gatgtacaga actgaaattc gaatggcgag |
| 241 | gatggcaaga aaagctggca acttctatgt acctgcagaa cccaaattgg cgtttgtcat |
| 301 | cagaatcaga ggtatcaatg gagtgagccc aaaggttcga aaggtgttgc agcttcttcg |
| 361 | ccttcgtcaa atcttcaatg gaacctttgt gaagctcaac aaggcttcga ttaacatgct |
| 421 | gaggattgta gagccatata ttgcatgggg gtaccccaat ctgaagtcag taaatgaact |
| 481 | aatctacaag cgtggttatg gcaaaatcaa taagaagcga attgctttga cagataacgc |
| 541 | tttgattgct cgatctcttg gtaaatacgg catcatctgc atggaggatt tgattcatga |
| 601 | gatccatact gttggaaaac gcttcaaaga ggcaaataac ttcctgtggc ccttcaaatt |
| 661 | gtcttctcca cgaggtggaa tgaagaaaaa gaccacccat tttgtagaag gtggagatgc |
| 721 | tggcaacagg gaggaccaga tcaacaggct tattagaaga atgaactaag gtgtctacca |
| 781 | tgattatttt tctaagctgg ttggttaata aacagtacct gctctcaaat tgaaataaaa |

LOCUS NM_000972 890 bp mRNA linear PRI 07-JUL-2013
DEFINITION Homo sapiens ribosomal protein L7a (RPL7A), mRNA. (SEQ ID NO: 654)

| | |
|---|---|
| 1 | tttcctttct ctctcctccc gccgcccaag atgccgaaag gaaagaaggc caagggaaag |
| 61 | aaggtggctc cggccccagc tgtcgtgaag aagcaggagg ctaagaaagt ggtgaatccc |
| 121 | ctgtttgaga aaaggcctaa gaattttggc attggacagg acatccagcc caaaagagac |
| 181 | ctcacccgct ttgtgaaatg gccccgctat atcaggttgc agcggcagag agccatcctc |
| 241 | tataagcggc tgaaagtgcc tcctgcgatt aaccagttca cccaggccct ggaccgccaa |
| 301 | acagctactc agctgcttaa gctggcccac aagtacagac cagagacaaa gcaagagaag |
| 361 | aagcagagac tgttggcccg ggccgagaag aaggctgctg gcaaagggga cgtcccaacg |
| 421 | aagagaccac ctgtccttcg agcaggagtt aacaccgtca ccaccttggt ggagaacaag |
| 481 | aaagctcagc tggtggtgat tgcacacgac gtggatccca tcgagctggt tgtcttcttg |
| 541 | cctgccctgt gtcgtaaaat gggggtccct tactgcatta tcaagggaaa ggcaagactg |
| 601 | ggacgtctag tccacaggaa gacctgcacc actgtcgcct tcacacaggt gaactcggaa |
| 661 | gacaaaggcg ctttggctaa gctggtggaa gctatcagga ccaattacaa tgacagatac |
| 721 | gatgagatcc gccgtcactg gggtggcaat gtcctgggtc ctaagtctgt ggctcgtatc |
| 781 | gccaagctcg aaaaggcaaa ggctaaagaa cttgccacta aactgggtta aatgtacact |
| 841 | gttgagtttt ctgtacataa aaataattga aataatacaa attttccttc |

LOCUS NM_000973 903 bp mRNA linear PRI 10-JAN-2014
DEFINITION Homo sapiens ribosomal protein L8 (RPL8), transcript variant 1,
mRNA. (SEQ ID NO: 655)

| | |
|---|---|
| 1 | agataaggcc gctcgctgac gccgtgtttc ctctttcggc cgcgctggtg aacaggaccc |
| 61 | gtcgccatgg gccgtgtgat ccgtggacag aggaagggcg ccgggtctgt gttccgcgcg |
| 121 | cacgtgaagc accgtaaagg cgctgcgcgc ctgcgcgccg tggatttcgc tgagcggcac |
| 181 | ggctacatca agggcatcgt caaggacatc atccacgacc cgggccgcgg cgcgcccctc |
| 241 | gccaaggtgg tcttccggga tccgtatcgg tttaagaagc ggacggagct gttcattgcc |
| 301 | gccgagggca ttcacacggg ccagtttgtg tattgcggca agaaggccca gctcaacatt |
| 361 | ggcaatgtgc tccctgtggg caccatgcct gagggtacaa tcgtgtgctg cctggaggag |
| 421 | aagcctggag accgtggcaa gctggcccgg gcatcaggga actatgccac cgttatctcc |
| 481 | cacaaccctg agaccaagaa gacccgtgtg aagctgccct ccggctccaa gaaggttatc |
| 541 | tcctcagcca acagagctgt ggttggtgtg gtggctggag gtggccgaat tgacaaaccc |
| 601 | atcttgaagg ctggccgggc gtaccacaaa tataaggcaa agaggaactg ctggccacga |
| 661 | gtacggggtg tggccatgaa tcctgtggag catccttttg gaggtggcaa ccaccagcac |
| 721 | atcggcaagc cctccaccat ccgcagagat gcccctgctg gccgcaaagt gggtctcatt |
| 781 | gctgcccgcc ggactggacg tctccgggga accaagactg tgcaggagaa agagaactag |
| 841 | tgctgagggc ctcaataaag tttgtgttta tgccaa |

LOCUS NM_000661 766 bp mRNA linear PRI 26-JAN-2014
DEFINITION Homo sapiens ribosomal protein L9 (RPL9), transcript variant 1,
mRNA. (SEQ ID NO: 656)

| | |
|---|---|
| 1 | acgcgataca agtacgtaat gacgacagac gttctttctt tgctgcgtct actgcgagaa |
| 61 | tgaagactat tctcagcaat cagactgtcg acattccaga aaatgtcgac attactctga |
| 121 | agggacgcac agttatcgtg aagggcccca gaggaaccct gcggagggac ttcaatcaca |
| 181 | tcaatgtaga actcagcctt cttggaaaga aaaaaaagag gctccgggtt gacaaatggt |
| 241 | ggggtaacag aaaggaactg gctaccgttc ggactatttg tagtcatgta cagaacatga |
| 301 | tcaagggtgt tacactgggc ttccgttaca agatgaggtc tgtgtatgct cacttcccca |
| 361 | tcaacgttgt tatccaggag aatgggtctc ttgttgaaat ccgaaatttc ttgggtgaaa |
| 421 | aatatatccg cagggttcgg atgagaccag gtgttgcttg ttcagtatct caagcccaga |
| 481 | aagatgaatt aatccttgaa ggaaatgaca ttgagcttgt ttcaaattca gcggctttga |
| 541 | ttcagcaagc cacaacagtt aaaaacaagg atatcaggaa atttttggat ggtatctatg |
| 601 | tctctgaaaa aggaactgtt cagcaggctg atgaataaga tctaagagtt acctggctac |
| 661 | agaaagaaga tgccagatga cacttaagac ctacttgtga tatttaaatg atgcaataaa |
| 721 | agacctattg atttggacct tcttcttaaa |

LOCUS NM_006013 2335 bp mRNA linear PRI 18-JAN-2014
DEFINITION Homo sapiens ribosomal protein L10 (RPL10), transcript variant 1,
mRNA. (SEQ ID NO: 657)

| | |
|---|---|
| 1 | gggctacgcc cgggcgcaag cgccaagagc ggctgcgtct atggtcatga cgtctgacag |
| 61 | agcgtccacc cgtcttcgac aggactctat ggttcttacg cgcgcagaca gaccgcctat |
| 121 | ataagccatg cgcaggcgga ggagcgcctc tttcccttcg gtgtgccact gaagatcctg |
| 181 | gtgtcgccat gggccgccgc cccgcccgtt gttaccggta ttgtaagaac aagccgtacc |
| 241 | caaagtctcg cttctgccga ggtgtccctg atgccaagat tcgcattttt gacctggggc |
| 301 | ggaaaaaggc aaaagtggat gagtttccgc tttgtggcca catggtgtca gatgaatatg |
| 361 | agcagctgtc ctctgaagcc ctggaggctg cccgaatttg tgccaataag tacatggtaa |
| 421 | aaagttgtgg caaagatggc ttccatatcc gggtgcggct ccaccccttc cacgtcatcc |
| 481 | gcatcaacaa gatgttgtcc tgtgctgggg ctgacaggct ccaaacaggc atgcgaggtg |
| 541 | cctttggaaa gccccagggc actgtggcca gggttcacat tggccaagtt atcatgtcca |
| 601 | tccgcaccaa gctgcagaac aaggagcatg tgattgaggc cctgcgcagg gccaagttca |
| 661 | agtttcctgg ccgccagaag atccacatct caaagaagtg gggcttcacc aagttcaatg |
| 721 | ctgatgaatt tgaagacatg gtggctgaaa agcggctcat cccagatggc tgtggggtca |
| 781 | agtacatccc caatcgtggc cctctggaca agtggcgggc cctgcactca tgagggcttc |
| 841 | caatgtgctg cccccctctt aatactcacc aataaattct acttcctgtc cacctatgtc |
| 901 | tttgtatcta cattcttgac ggggaaggaa cttcctctgg gaacctttgg gtcattgccc |
| 961 | tttcacttca gaaacaggtt gacaactcag ccctgctcat gaggcagcaa accctgcaaa |
| 1021 | gggctgggac tggtggcctt atgtcagttg tctactctgg agcttgactt ggacctcccc |
| 1081 | aggtcctagg cagtaggttg aaaaacactg aagtgctttt catgaagcac agctgcagca |
| 1141 | aagccttgca atcccaggct ggggtcagcc tacagttgtg ttgcttatta caacacatgc |
| 1201 | ggaccaagag gggcttgtgg gctagaggct gaccagcagc gtttatttag caagggtagg |
| 1261 | tgtgcatcac attgggcttg ttctcaccca tctggtttgg ccattcctcc ttggtgggaa |
| 1321 | tcatccaggt actgctgagg tcacctgcga tttgccccat ttcctatctc tagcaacctc |
| 1381 | ctgggcccca tgcccccacc ccttctagaa cctgcattcc cagggccttc accacctgac |
| 1441 | caaaggtcta ggctaacctt tggtcatttg taacaagacc tcggaacaga cacgtgtgtg |
| 1501 | gcatggtttg gcctggggat cttagatgtc tgacctgaac tattgtagaa cagcgctggc |
| 1561 | ttttggggga gcagcaaaaa tgagaggagt gctaggtggg tggcctgagc atctgtatcc |
| 1621 | agggacagga ctccaaaggc ttttggtccc agagctgggg tatgttggcc ccagccccca |
| 1681 | gcctgtggct cccaaaaggc ctctggtttt ttgtaatctc agtttacagc catttcttag |
| 1741 | gtttttaatt acctttattt tattttgcca aacatacctg ggaatacctt ttattttttt |
| 1801 | tttaccttgg ggtgatggtt ccaaaccata aatgtgatta tagttaacac atgacccttc |
| 1861 | tagcgtccca gccagtgttt ttcctgacct ctgttctttg gagaggagga tggaagggag |
| 1921 | gggtccggca cgctgctggc attttgctgt gtcctgcagc ccctttccgg gacacctggg |
| 1981 | ttcacacagc tttttagctt acataactgg tgcagatttt ctgtgtggag atgttgcctt |
| 2041 | gaccagcctt ggctggactt taccaggcat gcagaagcct gtaccaacac agactacagc |
| 2101 | acccaggagg tgcgagtgtg gctgctcagc ggttataaca ggcctgactg cattgttcac |
| 2161 | cggattataa tgagccaaaa tgtttcccgg tgtttgctgg tttcagggaa ggagtttgat |
| 2221 | atagcagatt aaccaccctc cttgtagcta ttggggctta atggtttcct ggtgattctt |
| 2281 | accaatccac aataaacatg gcccattggc atatctgcaa |

LOCUS NM_007104 719 bp mRNA linear PRI 26-JAN-2014
DEFINITION Homo sapiens ribosomal protein L10a (RPL10A), mRNA.
(SEQ ID NO: 658)

| | |
|---|---|
| 1 | agtctctttt ccggttagcg cggcgtgaga agccatgagc agcaaagtct ctcgcgacac |
| 61 | cctgtacgag gcggtgcggg aagtcctgca cgggaaccag cgcaagcgcc gcaagttcct |
| 121 | ggagacggtg gagttgcaga tcagcttgaa gaactatgat ccccagaagg acaagcgctt |
| 181 | ctcgggcacc gtcaggctta agtccactcc ccgccctaag ttctctgtgt gtgtcctggg |
| 241 | ggaccagcag cactgtgacg aggctaaggc cgtggatatc ccccacatgg acatcgaggc |
| 301 | gctgaaaaaa ctcaacaaga ataaaaaact ggtcaagaag ctggccaaga agtatgatgc |
| 361 | gtttttggcc tcagagtctc tgatcaagca gattccacga atcctcggcc caggtttaaa |
| 421 | taaggcagga aagttccctt ccctgctcac acacaacgaa aacatggtgg ccaaagtgga |
| 481 | tgaggtgaag tccacaatca agttccaaat gaagaaggtg ttatgtctgg ctgtagctgt |
| 541 | tggtcacgtg aagatgacag acgatgagct tgtgtataac attcacctgg ctgtcaactt |
| 601 | cttggtgtca ttgctcaaga aaaactggca gaatgtccgg gccttatata tcaagagcac |
| 661 | catgggcaag ccccagcgcc tatattaagg cacatttgaa taaattctat taccagttc |

LOCUS NM_000975 644 bp mRNA linear PRI 19-JAN-2014
DEFINITION Homo sapiens ribosomal protein L11 (RPL11), transcript variant 1,
mRNA. (SEQ ID NO: 659)

| | |
|---|---|
| 1 | aaggccctcg gccggaagct ccgctttctc ttcctgctct ccatcatggc gcaggatcaa |
| 61 | ggtgaaaagg agaaccccat gcgggaactt cgcatccgca aactctgtct caacatctgt |
| 121 | gttggggaga gtggagacag actgacgcga gcagccaagg tgttggagca gctcacaggg |
| 181 | cagacccctg tgttttccaa agctagatac actgtcagat cctttggcat ccggagaaat |
| 241 | gaaaagattg ctgtccactg cacagttcga ggggccaagg cagaagaaat cttggagaag |
| 301 | ggtctaaagg tgcgggagta tgagttaaga aaaaacaact tctcagatac tggaaacttt |
| 361 | ggttttggga tccaggaaca catcgatctg ggtatcaaat atgacccaag cattggtatc |
| 421 | tacggcctgg acttctatgt ggtgctgggt aggccaggtt tcagcatcgc agacaagaag |
| 481 | cgcaggacag gctgcattgg ggccaaacac agaatcagca aagaggaggc catgcgctgg |
| 541 | ttccagcaga agtatgatgg gatcatcctt cctggcaaat aaattcccgt ttctatccaa |
| 601 | aagagcaata aaaagttttc agtgaaatgt gcaaaaa |

LOCUS NM_000976 674 bp mRNA linear PRI 10-JAN-2014
DEFINITION Homo sapiens ribosomal protein L12 (RPL12), mRNA. (SEQ ID NO: 660)

| | |
|---|---|
| 1 | atctggcttg tccgcgcgat ttccggcctc tcggctttcg gctcggagga ggccaaggtg |
| 61 | caacttcctt cggtcgtccc gaatccgggt tcatccgaca ccagccgcct ccaccatgcc |
| 121 | gccgaagttc gaccccaacg agatcaaagt cgtatacctg aggtgcaccg gaggtgaagt |
| 181 | cggtgccact tctgccctgg cccccaagat cggccccctg ggtctgtctc caaaaaaagt |
| 241 | tggtgatgac attgccaagg caacgggtga ctggaagggc ctgaggatta cagtgaaact |
| 301 | gaccattcag aacagacagg cccagattga ggtggtgcct tctgcctctg ccctgatcat |
| 361 | caaagccctc aaggaaccac caagagacag aaagaaacag aaaaacatta aacacagtgg |
| 421 | gaatatcact tttgatgaga ttgtcaacat tgctcgacag atgcggcacc gatccttagc |
| 481 | cagagaactc tctggaacca ttaaagagat cctggggact gcccagtcag tgggctgtaa |
| 541 | tgttgatggc cgccatcctc atgacatcat cgatgacatc aacagtggtg ctgtggaatg |
| 601 | cccagccagt taagcacaaa ggaaaacatt tcaataaagg atcatttgac aactggtgga |

LOCUS NM_033251 4672 bp mRNA linear PRI 17-APR-2013
DEFINITION Homo sapiens ribosomal protein L13 (RPL13), transcript variant 2,
mRNA. (SEQ ID NO: 661)

| | |
|---|---|
| 1 | aggtgaggga gactgggtcc tggcctttgg gcatcatcca gcgccatcgg cctggcgctt |
| 61 | cagccaacgc gggagtggat gggccccttc ttcttcgcag acagcgttcg gccgctgccc |
| 121 | gggctctagg cgcggccgga cggcccagtc tggagggttc ggggcggagg cccggggggg |
| 181 | tgcgcgcgcc cggggtccgg cctctcactc gctcccctct cgtccgcagc cgcagggccg |
| 241 | taggcagcca tggcgcccag ccggaatggc atggtcttga agccccactt ccacaaggac |
| 301 | tggcagcggc gcgtggccac gtggttcaac cagccggccc gtaagatccg cagacgtaag |
| 361 | gcccggcaag ccaaggcgcg ccgcatcgcc ccgcgccccg cgtcgggtcc catccggccc |
| 421 | atcgtgcgct gccccacggt tcggtaccac acgaaggtgc gcgccggccg cggcttcagc |
| 481 | ctggaggagc tcagggtggc cggcattcac aagaaggtgg cccggaccat cggcatttct |
| 541 | gtggatccga ggaggcggaa caagtccacg gagtccctgc aggccaacgt gcagcggctg |
| 601 | aaggagtacc gctccaaact catcctcttc cccaggaagc cctcggcccc caagaaggga |
| 661 | gacagttctg ctgaagaact gaaactggcc acccagctga ccggaccggt catgcccgtc |
| 721 | cggaacgtct ataagaagga gaaagctcga gtcatcactg aggaagagaa gaatttcaaa |
| 781 | gccttcgcta gtctccgtat ggcccgtgcc aacgcccggc tcttcggcat acgggcaaaa |
| 841 | agagccaagg aagccgcaga acaggatgtt gaaaagaaaa aataaagccc tcctggggac |
| 901 | ttggaatcag tcggcagtca tgctgggtct ccacgtggtg tgtttcgtgg gaacaactgg |
| 961 | gcctgggatg gggcttcact gctgtgactt cctcctgcca ggggatttgg ggctttcttg |
| 1021 | aaagacagtc caagccctgg ataatgcttt actttctgtg ttgaagcact gttggttgtt |
| 1081 | tggttagtga ctgatgtaaa acggttttct tgtggggagg ttacagaggc tgacttcaga |
| 1141 | gtggacttgt gttttttctt tttaaagagg caaggttggg ctggtgctca cagctgtaat |
| 1201 | cccagcactt tgaggttggc tgggagttca agaccagcct ggccaacatg tcagaactac |
| 1261 | taaaaataaa gaaatcagcc atgcttggtg ctgcacactt gtagttgcag ctcctgggag |
| 1321 | gcagaggtga gggatcactt aacccaggag gcagaggctg cactgagcca ggatcacgcc |
| 1381 | actgcactct agcctgggca acagtgagac tgtctcaaaa aaaaaaaaag agacagggtc |
| 1441 | ttcggcaccc aggctggagt acagtgccac aatcatggct cactgcagtc ttgaactcat |
| 1501 | ggcctcaagc agtcctccct cagcctccca agtagagggg tttataggca cgagaccctg |
| 1561 | cacccaacct agagttgcct tttttaagca aagcagtttc tagttaatgt agcatcttgg |
| 1621 | actttggggc gtcattctta agcttgttgt gcccggtaac catggtcctc ttgctctgat |
| 1681 | taacccttcc ttcaatgggc ttcttcaccc agacaccaag gtatgagatg gccctgccaa |
| 1741 | gtgtcggcct ctcctgttaa acaaaaacat tctaaagcca ttgttcttgc ttcatggaca |
| 1801 | agaggcagcc agagagagtg ccagggtgcc ctggtctgag ctggcatccc catgtcttct |
| 1861 | gtgtccgagg gcagcatggt ttctcgtgca gtgctcagac acagcctgcc ctagtcctac |
| 1921 | cagctcacag cagcacctgc tctccttggc agctatggcc atgacaaccc cagagaagca |
| 1981 | gcttcaggga ccgagtcaga ttctgttttg tctacatgcc tctgccgggt gccggtattg |
| 2041 | aggcacccag ggagctgtta ctggcgtgga aataggtgat gctgctacct ctgctgctgc |
| 2101 | actcacagcc acacttgata cacgatgaca ccttgcttgt ttggaaacat ctaaacatct |
| 2161 | agtagatgac ttgcaggctg ttggctacca gtttcctgtc tgaggtgtat atgttaactt |
| 2221 | cgtgatcagt ttgtatgttt gggactcttg tcctatgtaa agttaaggtg ggccgggtgc |
| 2281 | agtggctcac gcctgtaatc ctaacactgg gaggccgagg cgggtggatc acctgatggt |
| 2341 | gaaacctcat ctctactgaa aatacaaaaa ttagctgagt ggtgacacac gcctgtaatc |
| 2401 | ccagctactt ggtaggcttg aacccaggag gcagagattg cagtgagccg agctgcacca |
| 2461 | ctgtgctcca gcctgggtga cagcgagact cagtctcaaa aaaagttgta caaggtggat |
| 2521 | ggttggaagc ttgagcctag gctcgaatcc ctctcacgtg agagggcctg aagatttctg |
| 2581 | gtggattcca acctggctga agactggccg tggggggtgc aggggtctcc agcgctctgc |
| 2641 | cctccagcct gcttcctccc tgcccacacc gcactagggg aagggccttt cctgctgcct |
| 2701 | gcggggccgc acctggagta ggtaatgcca tgtggtgacg tgaatggagc agaggtctgt |
| 2761 | gccccatcac accgccttgc tgtttttact gtgggacaaa agcactctga tctgcgtgtt |
| 2821 | ccgggggccc tcctaccagc cgacttgacg ggaagtcagg gttcaggtat catctgtgca |
| 2881 | cctggggcgg ggtagtctgc actgaacctg ccagagtccc ctcctcattt cactgaaagt |
| 2941 | cacagtctcc agggctgtgt tgctaacctt acgttctctc cgtttgctta atctattaag |
| 3001 | agccctaaca ggagaggatg ggctttctct gttgtctggg gccctgctgt tggccggtgc |
| 3061 | tcttagcaag aggtcatttt tctaggttgc gctgggacat tgtgagtttg gtgagggtca |
| 3121 | tggatgtggg ctgggctggg ctgggctggg ccgggctgcc tgctgcctgc tgctccccta |
| 3181 | cctgaaatgc agctagtgcg gctctgccct tcctggggct gaggaaggct tctgcaggat |
| 3241 | agctgggggg ctgggcaggt gggtgaggca gcctccctgc tgacactcag tccttgtagc |
| 3301 | tggagcaaga tctcctgatc caggtacggg cctgtctgct ccaagaaaga ctctgccacc |
| 3361 | agatgcaaag gggccctttg ttttaactta gtccctgggg accgcctgat tcagcacctg |
| 3421 | tcggcccagg ataccccgct ggtggggaca agtgcctgag tgtgggccgt gcccgagtgt |
| 3481 | ggccatccct gagtggggcc gtcctgacta ggaagtggct tttcagttgt gatgtgtggg |
| 3541 | cctgacctag ggggcgctgt ggaacccggg ctggaaccag ccctctgtgc caggccgcag |
| 3601 | acaggttccg ccggccctga ggggcagctg ccatggcgtg ggtcactggg agctgagagg |
| 3661 | aagggccccc accgcacctc aggcaaagcg gctctgggaa caccttgatt tcgtccatgt |
| 3721 | gagccgtccc agggagggca gccaagctgt gaagcctgag aaactgacct gtgtgccacg |
| 3781 | agcttgtggt ctgctgcccg gtggaggaag tgcaggtgcg cccaggctcc tcattccgtt |
| 3841 | ttgcaggatt ccttcggggt gtgagcattt cctattcagc ctgtcgcccc cggggagcac |
| 3901 | gggctggctc tgtggtgccc gtggcctttt gtagaagcgt tggttttacg gcaggttcat |
| 3961 | ctctggggca gcctcccaca gtgggtgggg ctttgccagc agtgcccacg ggggtcatgg |
| 4021 | ggccaggcgc gctccggcgc ctgcagaact gatcggggat agtctcagga ggcgctagtc |
| 4081 | acgtgccccg gtgatcgggg atagtctcag aaggcgctag tctcctgccc cggtgatcgg |
| 4141 | ggatagtctc aggaggcacg agtcgcctgc ctcggtgatg caccgtttct cacaccggct |
| 4201 | gctctggccc gagctaaagg ggaagacgtg tgcggatagg agctgcacac aattttcctc |
| 4261 | catgtattgt ttattttgct ttttcttttg gctagacatt aggaatttca gttttcccaa |
| 4321 | gttgtatttt tccttttcta ttttaaaatt atcatgcagg gctgggtgag gtcgctcacg |
| 4381 | cctatagtct caaaactttg ggaggctgag gggggaggat ggcatgagcc caggagttta |
| 4441 | aggctgcagt gagccgagat cgctccactg tcctccagcc tgcatgacag agcgagaccc |
| 4501 | tatctcagga aaaaaaaaaa caaaactatt atgcagtagt ttcgaccctg gaagacgagt |
| 4561 | gtgcatcttt gagttgtaac acgtgtacct cgcccatcca ggcgtagttt catttggaat |
| 4621 | ctggttatcc tgtagttgct ttgttaaaaa tatatgtaat tgcaaatcat tt |

LOCUS NM_012423 1196 bp mRNA linear PRI 03-NOV-2013
DEFINITION Homo sapiens ribosomal protein L13a (RPL13A), transcript variant
1, mRNA. (SEQ ID NO: 662)

| | |
|---|---|
| 1 | cacttctgcc gcccctgttt caagggataa gaaaccctgc gacaaaacct cctccttttc |
| 61 | caagcggctg ccgaagatgg cggaggtgca ggtcctggtg cttgatggtc gaggccatct |
| 121 | cctgggccgc ctggcggcca tcgtggctaa acaggtactg ctgggccgga aggtggtggt |
| 181 | cgtacgctgt gaaggcatca acatttctgg caatttctac agaaacaagt tgaagtacct |
| 241 | ggctttcctc cgcaagcgga tgaacaccaa cccttcccga ggcccctacc acttccgggc |
| 301 | ccccagccgc atcttctggc ggaccgtgcg aggtatgctg ccccacaaaa ccaagcgagg |
| 361 | ccaggccgct ctggaccgtc tcaaggtgtt tgacggcatc ccaccgccct acgacaagaa |
| 421 | aaagcggatg gtggttcctg ctgccctcaa ggtcgtgcgt ctgaagccta caagaaagtt |
| 481 | tgcctatctg gggcgcctgg ctcacgaggt tggctggaag taccaggcag tgacagccac |
| 541 | cctggaggag aagaggaaag agaaagccaa gatccactac cggaagaaga aacagctcat |
| 601 | gaggctacgg aaacaggccg agaagaacgt ggagaagaaa attgacaaat acacagaggt |
| 661 | cctcaagacc cacggactcc tggtctgagc ccaataaaga ctgttaattc ctcatgcgtt |
| 721 | gcctgccctt cctccattgt tgccctggaa tgtacgggac ccaggggcag cagcagtcca |
| 781 | ggtgccacag gcagccctgg gacataggaa gctgggagca aggaaagggt cttagtcact |
| 841 | gcctcccgaa gttgcttgaa agcactcgga gaattgtgca ggtgtcattt atctatgacc |
| 901 | aataggaaga gcaaccagtt actatgagtg aaagggagcc agaagactga ttggagggcc |
| 961 | ctatcttgtg agtggggcat ctgttggact ttccacctgg tcatatactc tgcagctgtt |
| 1021 | agaatgtgca agcacttggg gacagcatga gcttgctgtt gtacacaggg tatttctaga |
| 1081 | agcagaaata gactgggaag atgcacaacc aaggggttac aggcatcgcc catgctcctc |
| 1141 | acctgtattt tgtaatcaga aataaattgc ttttaaagaa |

LOCUS NM_003973 875 bp mRNA linear PRI 17-APR-2013
DEFINITION Homo sapiens ribosomal protein L14 (RPL14), transcript variant 2,
mRNA. (SEQ ID NO: 663)

| | |
|---|---|
| 1 | ggcggtgcgt tcttctacac atgcgcaggg ttgggcgggt cttcttcctt ctcgcctaac |
| 61 | gccgccaaca tggtgttcag gcgcttcgtg gaggttggcc gggtggccta tgtctccttt |
| 121 | ggacctcatg ccggaaaatt ggtcgcgatt gtagatgtta ttgatcagaa cagggctttg |
| 181 | gtcgatggac cttgcactca agtgaggaga caggccatgc ctttcaagtg catgcagctc |
| 241 | actgatttca tcctcaagtt tccgcacagt gcccaccaga agtatgtccg acaagcctgg |
| 301 | cagaaggcag acatcaatac aaaatgggca gccacacgat gggccaagaa gattgaagcc |
| 361 | agagaaagga aagccaagat gacagatttt gatcgtttta aagttatgaa ggcaaagaaa |
| 421 | atgaggaaca gaataatcaa gaatgaagtt aagaagcttc aaaaggcagc tctcctgaaa |
| 481 | gcttctccca aaaaagcacc tggtactaag ggtactgctg ctgctgctgc tgctgctgct |
| 541 | gctgctaaag ttccagcaaa aaagatcacc gccgcgagta aaaaggctcc agcccagaag |
| 601 | gttcctgccc agaaagccac aggccagaaa gcagcgcctg ctccaaaagc tcagaagggt |
| 661 | caaaaagctc cagcccagaa agcacctgct ccaaaggcat ctggcaagaa agcataagtg |
| 721 | gcaatcataa aaagtaataa aggttctttt tgacctgttg acaaatgtat ttaagccttt |
| 781 | ggatttaaag cctgttgagg ctggagttag gaggcagatt gatagtagga ttataataaa |
| 841 | cattaaataa tcagttcaaa |

LOCUS NM_002948 2350 bp mRNA linear PRI 18-JAN-2014
DEFINITION Homo sapiens ribosomal protein L15 (RPL15), transcript variant 1,
mRNA. (SEQ ID NO: 664)

| | |
|---|---|
| 1 | aaagacagcg gctccaccgc ggtacgcggc caccggcttt ggagcctgga ccccaacttg |
| 61 | cctcctctcg cggagagaca gtcgccgacg ctcgcttagc cgccgagacc tcgccgccaa |
| 121 | ctctctcacc tctcgagacg cccaggccgc tcaggctcga atcttgcgga gcagggggcg |
| 181 | ggacaatagc ggccgcggcg ccccactcgg cagaactccg ccaccaggcg cgatgccgga |
| 241 | actacatgtc ccatgacgct ctgggaggcc gcagctttcc accggaaaga gggtggctga |
| 301 | ggtgggggag gagcccaaaa ggcattgtgg gagtacagct ctttcctttc cgtctggcgg |
| 361 | cagccatcag gtaagccaag atgggtgcat acaagtacat ccaggagcta tggagaaaga |
| 421 | agcagtctga tgtcatgcgc tttcttctga gggtccgctg ctggcagtac cgccagctct |
| 481 | ctgctctcca cagggctccc cgccccaccc ggcctgataa agcgcgccga ctgggctaca |
| 541 | aggccaagca aggttacgtt atatatagga ttcgtgttcg ccgtggtggc cgaaaacgcc |
| 601 | cagttcctaa gggtgcaact tacggcaagc ctgtccatca tggtgttaac cagctaaagt |
| 661 | ttgctcgaag ccttcagtcc gttgcagagg agcgagctgg acgccactgt ggggctctga |
| 721 | gagtcctgaa ttcttactgg gttggtgaag attccacata caaatttttt gaggttatcc |
| 781 | tcattgatcc attccataaa gctatcagaa gaaatcctga cacccagtgg atcaccaaac |
| 841 | cagtccacaa gcacagggag atgcgtgggc tgacatctgc aggccgaaag agccgtggcc |
| 901 | ttggaaaggg ccacaagttc caccacacta ttggtggctc tcgccgggca gcttggagaa |
| 961 | ggcgcaatac tctccagctc caccgttacc gctaatataa gtaaagtttg taaaattcat |
| 1021 | acttaataaa caatttagga cagtcatgtc tgcttacagg tgttatttgt ctgttaaaac |
| 1081 | tagtctgcag atgtttcttg aatgctttgt caaattaaga aagttaaagt gcaataatgt |
| 1141 | ttgaagacaa taagtggtgg tgtatcttgt ttctaataag ataaactttt ttgtctttgc |
| 1201 | tttatcttat tagggagttg tatgtcagtg tataaaacat actgtgtggt ataacaggct |
| 1261 | taataaattc tttaaaagga gagaactgaa actagccctg tagatttgtc tggtgcatgt |
| 1321 | gatgaaacct gcagctttat cggagtgatg gcaatgctct gctggtttat tttcaagtgg |
| 1381 | ctgcgttttt tttagtttgg caggtgtaga ctttttaagt tgggctttag aaaatctggg |
| 1441 | ttagcctgaa gaaaattgcc tcagcctcca cagtaccatt ttaaattcac ataaaaggtg |
| 1501 | aaagctcctg gttcagtgcc atggcttcat ggcattcagt gattagtggt aatggtaaac |
| 1561 | actggtgtgt tttgaagttg aatgtgcgat aaaattatta gccttaagat tggtaagcta |
| 1621 | gcaatgaatg ctagggtggg aagctggtga gccagtggcc attagataaa tacctttcaa |
| 1681 | gtgtgagctt agacgtcaac cctaaaatac ttaaccgtaa tgccaattgt gatcattatg |
| 1741 | aatcccttca gtcacattag ggggaaagta gttggctata agtacgtcat tcttagtcca |
| 1801 | gtcagtctta aaaacatctt gggttaccca ctctgtccac tcccataggc tacagaaaaa |
| 1861 | gtcacaagcg catggtttcc aaccatatgt gttttctgca gttatttctc ttgttctggc |
| 1921 | caaacaaccc taaaaatcct taccattcca caaagttgga ccatcacttg tgcacccact |
| 1981 | ttgactatga gtataccacc acattgcatt tctgtttgca ccatgtcttc caggagacta |
| 2041 | gactactgtt gtccagggtc aatttgagtg taaagaaaat gtagacaagg aattgcccaa |
| 2101 | ttttaaattc tgactttgct gacttaattt aaatgctcgt tctgaaccaa ttttctccta |
| 2161 | tcttctctag gggtttcaaa agactcagtt aattgatttc caggaagtac tcatagcaag |
| 2221 | ttcataaaag ttcttgagac ctaaatttct tcacaaaaaa agaaaagatc ttaagtcata |
| 2281 | cattttaatt gtgtagaggt tgttcaactg aaggaataaa tgtctattaa actaaaacaa |
| 2341 | atggaccttc |

LOCUS NM_000985 985 bp mRNA linear PRI 17-APR-2013
DEFINITION Homo sapiens ribosomal protein L17 (RPL17), transcript variant 1,
mRNA. (SEQ ID NO: 665)

| | |
|---|---|
| 1 | cctgcctcct cagatctcgt ttcttcggct acgaatctcg cgagaagtca agttctcatg |
| 61 | agttctccca aaatccaccg ctcttcctct ttccctaagc agcctgaggg ttgactggat |
| 121 | tggtgaggcc cgtgtggcta cttctgtgga agcagtgctg tagttactgg aagataaaag |
| 181 | ggaaagcaag cccttggtgg gggaaagtat ggctgcgatg atggcatttc ttaggacacc |
| 241 | tttggattaa taatgaaaac aactactctc tgagcagctg ttcgaatcat ctgatattta |
| 301 | tactgaatga gttactgtaa gtacgtattg acagaattac actgtacttt cctctaggtg |
| 361 | atctgtgaaa atggttcgct attcacttga cccggagaac cccacgaaat catgcaaatc |
| 421 | aagaggttcc aatcttcgtg ttcactttaa gaacactcgt gaaactgctc aggccatcaa |
| 481 | gggtatgcat atacgaaaag ccacgaagta tctgaaagat gtcactttac agaaacagtg |
| 541 | tgtaccattc cgacgttaca atggtggagt tggcaggtgt gcgcaggcca agcaatgggg |
| 601 | ctggacacaa ggtcggtggc ccaaaaagag tgctgaattt ttgctgcaca tgcttaaaaa |
| 661 | cgcagagagt aatgctgaac ttaagggttt agatgtagat tctctggtca ttgagcatat |
| 721 | ccaagtgaac aaagcaccta agatgcgccg ccggacctac agagctcatg gtcggattaa |
| 781 | cccatacatg agctctccct gccacattga gatgatcctt acggaaaagg aacagattgt |
| 841 | tcctaaacca gaagaggagg ttgcccagaa gaaaaagata tcccagaaga aactgaagaa |
| 901 | acaaaaactt atggcacggg agtaaattca gcattaaaat aaatgtaatt aaaaggaaaa |

LOCUS NM_000979 893 bp mRNA linear PRI 11-JAN-2014
DEFINITION Homo sapiens ribosomal protein L18 (RPL18), transcript variant 1,
mRNA. (SEQ ID NO: 666)

| | |
|---|---|
| 1 | gaaagctatc gagaacacgg cctgggtagg gccagagagg cccccgacgt gctggccctt |
| 61 | ccctcttgga cgttgcgctt gttcctgcgc tctatgctct ctgccgttat cgcccggcta |
| 121 | gtcagtcgtc caactcacca cagagaagtc cggatcgtgg tagagcgccg cgtcgcaccc |
| 181 | atgtgacgtc acggcggcgc cactcgcttg aggctttccc cgcccacccc agcccgttct |
| 241 | ctctttccgg acctggccga gcaggaggcg ccatcatggg agtggacatc cgccataaca |
| 301 | aggaccgaaa ggttcggcgc aaggagccca agagccagga tatctacctg aggctgttgg |
| 361 | tcaagttata caggtttctg gccagaagaa ccaactccac attcaaccag gttgtgttga |
| 421 | agaggttgtt tatgagtcgc accaaccggc cgcctctgtc cctttcccgg atgatccgga |
| 481 | agatgaagct tcctggccgg gaaaacaaga cggccgtggt tgtggggacc ataactgatg |
| 541 | atgtgcgggt tcaggaggta cccaaactga aggtatgtgc actgcgcgtg accagccggg |
| 601 | cccgcagccg catcctcagg gcagggggca agatcctcac tttcgaccag ctggccctgg |
| 661 | actcccctaa gggctgtggc actgtcctgc tctccggtcc tcgcaagggc cgagaggtgt |
| 721 | accggcattt cggcaaggcc ccaggaaccc cgcacagcca caccaaaccc tacgtccgct |
| 781 | ccaagggccg gaagttcgag cgtgccagag gccgacgggc cagccgaggc tacaaaaact |
| 841 | aaccctggat cctactctct tattaaaaag atttttgctg acagtgcaaa |

LOCUS NM_000981 748 bp mRNA linear PRI 17-APR-2013
DEFINITION Homo sapiens ribosomal protein L19 (RPL19), mRNA. (SEQ ID NO: 667)

| | |
|---|---|
| 1 | gcagataatg ggaggagccg ggcccgagcg agctctttcc tttcgctgct gcggccgcag |
| 61 | ccatgagtat gctcaggctt cagaagaggc tcgcctctag tgtcctccgc tgtggcaaga |
| 121 | agaaggtctg gttagacccc aatgagacca atgaaatcgc caatgccaac tcccgtcagc |
| 181 | agatccggaa gctcatcaaa gatgggctga tcatccgcaa gcctgtgacg gtccattccc |
| 241 | gggctcgatg ccggaaaaac accttggccc gccggaaggg caggcacatg ggcataggta |
| 301 | agcggaaggg tacagccaat gcccgaatgc cagagaaggt cacatggatg aggagaatga |
| 361 | ggattttgcg ccggctgctc agaagatacc gtgaatctaa gaagatcgat cgccacatgt |
| 421 | atcacagcct gtacctgaag gtgaagggga atgtgttcaa aaacaagcgg attctcatgg |
| 481 | aacacatcca caagctgaag gcagacaagg cccgcaagaa gctcctggct gaccaggctg |
| 541 | aggcccgcag gtctaagacc aaggaagcac gcaagcgccg tgaagagcgc ctccaggcca |
| 601 | agaaggagga gatcatcaag actttatcca aggaggaaga gaccaagaaa taaaacctcc |
| 661 | cactttgtct gtacatactg gcctctgtga ttacatagat cagccattaa aataaaacaa |
| 721 | gccttaatct gcaa |

LOCUS NM_017971 741 bp mRNA linear PRI 10-JAN-2 014
DEFINITION Homo sapiens mitochondrial ribosomal protein L20 (MRPL20), mRNA.
(SEQ ID NO: 668)

| | |
|---|---|
| 1 | cggaagcgct cgtgaccacc atttccgacc cgggcaagat ggcagcggcg ctgcgcgtgc |
| 61 | gttgttgagt gttcgggacg ccggcctgca ggcgccatgg tcttcctcac cgcgcagctc |
| 121 | tggctgcgga atcgcgtcac cgaccgctac tttcggatcc aggaggtgct gaagcacgcc |
| 181 | aggcacttcc ggggaaggaa aaatcgctgc tacaggttgg cggtcagaac cgtgattcga |
| 241 | gcctttgtga aatgcaccaa agcccgatac ctgaagaaaa agaacatgag gaccctctgg |
| 301 | attaatcgaa ttacagctgc tagccaggaa catggactga agtatccagc gctcattggg |
| 361 | aatttagtta agtgccaggt ggagctcaac aggaaagtcc tagcggatct ggccatctac |
| 421 | gagccaaaga ctttcaaatc tttggctgcc ttggccagta ggaggcgaca cgaaggattt |
| 481 | gctgctgcct tgggggatgg gaaggaacct gaaggcattt tttccagagt ggtgcagtac |
| 541 | cactgaggac tgttgctgta ttgattagga aaagagacag agtaatttgc agtttgtttg |
| 601 | atttatactt ttgtttatct acaacccaat aacagacatg agggatggcc ctgtctctct |
| 661 | gggacagagc ctcacagatg atgtccatgt tttgtgtgaa tgaaactcaa acactcttca |
| 721 | gtttttagag tcaaaaaaaa |

LOCUS NM_000982 582 bp mRNA linear PRI 26-JAN-2014
DEFINITION Homo sapiens ribosomal protein L21 (RPL21), mRNA. (SEQ ID NO: 669)

| | |
|---|---|
| 1 | tttcctttcg gccggaaccg ccatcttcca gtaattcgcc aaaatgacga acacaaaggg |
| 61 | aaagaggaga ggcacccgat atatgttctc taggcctttt agaaaacatg gagttgttcc |
| 121 | tttggccaca tatatgcgaa tctataagaa aggtgatatt gtagacatca agggaatggg |
| 181 | tactgttcaa aaaggaatgc cccacaagtg ttaccatggc aaaactggaa gagtctacaa |
| 241 | tgttacccag catgctgttg gcattgttgt aaacaaacaa gttaagggca agattcttgc |
| 301 | caagagaatt aatgtgcgta ttgagcacat taagcactct aagagccgag atagcttcct |
| 361 | gaaacgtgtg aaggaaaatg atcagaaaaa gaaagaagcc aaagagaaag gtacctgggt |
| 421 | tcaactaaag cgccagcctg ctccacccag agaagcacac tttgtgagaa ccaatgggaa |
| 481 | ggagcctgag ctgctggaac ctattcccta tgaattcatg gcataatagg tgttaaaaaa |
| 541 | aaaaataaag gacctctggg ctacaaaaaa |

LOCUS NM_000983 2099 bp mRNA linear PRI 10-JAN-2014
DEFINITION Homo sapiens ribosomal protein L22 (RPL22), mRNA. (SEQ ID NO: 670)

| | |
|---|---|
| 1 | gcgtctgcgt agttcgctca cctccctttc taactccgct gccgccatgg ctcctgtgaa |
| 61 | aaagcttgtg gtgaaggggg gcaaaaaaaa gaagcaagtt ctgaagttca ctcttgattg |
| 121 | cacccaccct gtagaagatg gaatcatgga tgctgccaat tttgagcagt ttttgcaaga |
| 181 | aaggatcaaa gtgaacggaa aagctgggaa ccttggtgga ggggtggtga ccatcgaaag |
| 241 | gagcaagagc aagatcaccg tgacatccga ggtgcctttc tccaaaaggt atttgaaata |
| 301 | tctcaccaaa aaatatttga agaagaataa tctacgtgac tggttgcgcg tagttgctaa |
| 361 | cagcaaagag agttacgaat tacgttactt ccagattaac caggacgaag aagaggagga |
| 421 | agacgaggat taaatttcat ttatctggaa aattttgtat gagttcttga ataaaacttg |
| 481 | ggaaccaaaa tggtggttta tccttgtatc tctgcagtgt ggattgaaca gaaaattgga |
| 541 | aatcatagtc aaagggcttc ccttggttcg ccactcattt atttgtaact tgacttcttt |
| 601 | ttttttctgc ttaaaaattt caattctcgt ggtaatacca gagtagaagg agagggtgac |
| 661 | tttaccgaac tgacagccat tggggaggca gatgcgggtg tggaggtgtg ggctgaaggt |
| 721 | agtgactgtt tgattttaaa aagtgtgact gtcagttgta tctgttgctt ttctcaatga |
| 781 | ttcagggata caaatgggct tctctcattc attaaaagaa aacgcgacat ctttctaaga |
| 841 | ttctctgtgg gaaaatgact gtcaataaaa tgcgggtttc tgggccattc gtcttacttt |
| 901 | cattttttga ttacaaattt ctcttgacgc acacaattat gtctgctaat cctcttcttc |
| 961 | ctagagagag aaactgtgct ccttcagtgt tgctgccata aaggggtttg gggaatcgat |
| 1021 | tgtaaaagtc ccaggttcta aattaactaa atgtgtacag aaatgaacgt gtaagtaatg |
| 1081 | tttctacagg tctttgcaac aaactgtcac tttcgtctcc agcagaggga gctgtaggaa |
| 1141 | tagtgcttcc agatgtggtc tcccgtgtgg ggcccagcaa tgggggcccc tgatgccaag |
| 1201 | agctctggag gttcttgaaa gaggggacac gaaggaggag tgactgggaa gcctcccatg |
| 1261 | ccaaggaggt gggaggtgcc ctggaaatag ctgcctcatg ccacttaggc catgactgga |
| 1321 | tttaatgtca gtggtgtgcc acagtgcaga ggctagacaa ctgaaagggg ctaccaaggc |
| 1381 | tgggaaaaaa atgcaattgt tgctgtgagt gactttgaaa gactctggtg ccttgtggtg |
| 1441 | cccttctgaa attcaaacag taatgcaaaa gtgtctgcat tagaatttac ggtgtctaaa |
| 1501 | attcatgttt ttaaaagagc ttgcctacag atggtttcca cacttgaaat tgtgccctgc |
| 1561 | gagttgcata gctggaagtt caatgctcag tcctaccttg gctcccatta aacatttggt |
| 1621 | gctctgtgga ttgagttgaa cgtgttgagg ctttgcaatt tcacttgtgt taaaggctct |
| 1681 | ggcatttttc catttctatg caaatttctt tgaagcagaa ttgcttgcat atttcttctc |
| 1741 | tgccgtcaca gaaagcagag tttctttcaa acttcactga ggcatcagtt gctctttggc |
| 1801 | aatgtccctt aaccatgatt attaactaag tttgtggctt gagtttacaa attctacttg |
| 1861 | ttgcattgat gttcccatgt agtaagtcat ttttagtttg gttgtgaaaa aaccctgggc |
| 1921 | tgaagttggc atttcagtta aaagaaaaaa agaaactagt cccagatttg aaaacttgta |
| 1981 | ataaaattga aactcactgg ttttctatgt ctttttgaac tcttgtaatc gagttttgat |
| 2041 | catattttct attaaagtgg ctaacacctg gctactctta ctgtaaaaaa |

LOCUS NM_000978 594 bp mRNA linear PRI 26-JAN-2014
DEFINITION Homo sapiens ribosomal protein L23 (RPL23), mRNA. (SEQ ID NO: 671)

| | |
|---|---|
| 1 | ggccacgtga ggagggtggg cggggcgtta aagttcatat cccagtgtcc tttgaatcga |
| 61 | cttccttttt tcttttttcc ggcgttcaag atgtcgaagc gaggacgtgg tgggtcctct |
| 121 | ggtgcgaaat tccggatttc cttgggtctt ccggtaggag ctgtaatcaa ttgtgctgac |
| 181 | aacacaggag ccaaaaacct gtatatcatc tccgtgaagg ggatcaaggg acggctgaac |
| 241 | agacttcccg ctgctggtgt gggtgacatg gtgatggcca cagtcaagaa aggcaaacca |
| 301 | gagctcagaa aaaaggtaca tccagcagtg gtcattcgac aacgaaagtc ataccgtaga |
| 361 | aaagatggcg tgtttcttta ttttgaagat aatgcaggag tcatagtgaa caataaaggc |
| 421 | gagatgaaag gttctgccat tacaggacca gtagcaaagg agtgtgcaga cttgtggccc |
| 481 | cggattgcat ccaatgctgg cagcattgca tgattctcca gtatatttgt aaaaaataaa |
| 541 | aaaaaaaact aaacccatta aaaagtattt gtttgcaaaa |

LOCUS NM_000984 979 bp mRNA linear PRI 17-APR-2013
DEFINITION Homo sapiens ribosomal protein L23a (RPL23A), mRNA.
(SEQ ID NO: 672)

| | |
|---|---|
| 1 | agcattggag acccttttca caagatggcg ccgaaagcga agaaggaagc tcctgcccct |
| 61 | cctaaagctg aagccaaagc gaaggcttta aaggccaaga aggcagtgtt gaaaggtgtc |
| 121 | cacagccaca aaaagaagaa gatccgcacg tcacccacct tccggcggcc gaagacactg |
| 181 | cgactccgga gacagcccaa atatcctcgg aagagcgctc ccaggagaaa caagcttgac |
| 241 | cactatgcta tcatcaagtt tccgctgacc actgagtctg ccatgaagaa gatagaagac |
| 301 | aacaacacac ttgtgttcat tgtggatgtt aaagccaaca agcaccagat taaacaggct |
| 361 | gtgaagaagc tgtatgacat tgatgtggcc aaggtcaaca ccctgattcg gcctgatgga |
| 421 | gagaagaagg catatgttcg actggctcct gattacgatg ctttggatgt tgccaacaaa |
| 481 | attgggatca tctaaactga gtccagctgc ctaattctga atatatatat atatatatct |
| 541 | tttcaccata tacatgcctg tctgtcaatt tctggttggg ctgggaggcc acacacacac |
| 601 | actgacatga cagggcttgg gcaagactcc tgttctactt atccttttga aatacctcac |
| 661 | cctgccactc caccatgtat gatcattcca gagatctttg tgactagagt tagtgtccta |
| 721 | ggaaaaccag aactcagaac ttgcctccat ggttgagtaa caagctgtac aagaacccct |
| 781 | tttatccctg gaagaggctg tgtatgaaac caatgcccag ggtttgaagg gtgttagcat |
| 841 | ccatttcagg ggagtgtgga ttggctggct ctctggtagc attttgtcct cacacaccca |
| 901 | tctactatgt ccaaccggtc tgtctgcttc cctcacccct tgcccaataa aggacaagga |
| 961 | cttcagagga |

LOCUS NM_000986 579 bp mRNA linear PRI 26-JAN-2014
DEFINITION Homo sapiens ribosomal protein L24 (RPL24), mRNA. (SEQ ID NO: 673)

| | |
|---|---|
| 1 | tctttctttt cgccatcttt tgtctttccg tggagctgtc gccatgaagg tcgagctgtg |
| 61 | cagttttagc gggtacaaga tctaccccgg acacgggagg cgctacgcca ggaccgacgg |
| 121 | gaaggttttc cagtttctta atgcgaaatg cgagtcggct ttcctttcca agaggaatcc |
| 181 | tcggcagata aactggactg tcctctacag aaggaagcac aaaaagggac agtcggaaga |
| 241 | aattcaaaag aaaagaaccc gccgagcagt caaattccag agggccatta ctggtgcatc |
| 301 | tcttgctgat ataatggcca agaggaatca gaaacctgaa gttagaaagg ctcaacgaga |
| 361 | acaagctatc agggctgcta aggaagcaaa aaaggctaag caagcatcta aaaagactgc |
| 421 | aatggctgct gctaaggcac ctacaaaggc agcacctaag caaaagattg tgaagcctgt |
| 481 | gaaagtttca gctccccgag ttggtggaaa acgctaaact ggcagattag atttttaaat |
| 541 | aaagattgga ttataactct agaaaaaaaa |

LOCUS NM_000987 602 bp mRNA linear PRI 18-JAN-2014
DEFINITION Homo sapiens ribosomal protein L26 (RPL26), mRNA. (SEQ ID NO: 674)

| | |
|---|---|
| 1 | ataggtctcg cgagatcttt ggtaaactta cagaaccgga agcagcgtgt agttctcttc |
| 61 | ccttttgcgg ccatcaccga agcgggagcg gccaaaatga agtttaatcc ctttgtgact |
| 121 | tccgaccgaa gcaagaatcg caaaaggcat ttcaatgcac cttcccacat tcgaaggaag |
| 181 | attatgtctt cccctctttc caaagagctg agacagaagt acaacgtgcg atccatgccc |
| 241 | atccgaaagg atgatgaagt tcaggttgta cgtggacact ataaaggtca gcaaattggc |
| 301 | aaagtagtcc aggtttacag gaagaaatat gttatctaca ttgaacgggt gcagcgggaa |
| 361 | aaggctaatg gcacaactgt ccacgtaggc attcacccca gcaaggtggt tatcactagg |
| 421 | ctaaaactgg acaaagaccg caaaaagatc ctcgaacgga aagccaaatc tcgccaagta |
| 481 | ggaaaggaaa agggcaaata caaggaagaa accattgaga agatgcagga ataaagtaat |
| 541 | cttatataca agctttgatt aaaacttgaa acaaagagcc tgaaaaaaaa |

LOCUS NM_000988 514 bp mRNA linear PRI 26-JAN-2014
DEFINITION Homo sapiens ribosomal protein L27 (RPL27), mRNA. (SEQ ID NO: 675)

| | |
|---|---|
| 1 | tccttctttc ctttttgctg gtagggccgg gtggttgctg ccgaaatggg caagttcatg |
| 61 | aaacctggga aggtggtgct tgtcctggct ggacgctact ccggacgcaa agctgtcatc |
| 121 | gtgaagaaca ttgatgatgg cacctcagat cgcccctaca gccatgctct ggtggctgga |
| 181 | attgaccgct acccccgcaa agtgacagct gccatgggca agaagaagat cgccaagaga |
| 241 | tcaaagataa aatcttttgt gaaagtgtat aactacaatc acctaatgcc cacaaggtac |
| 301 | tctgtggata tccccttgga caaaactgtc gtcaataagg atgtcttcag agatcctgct |
| 361 | cttaaacgca aggcccgacg ggaggccaag gtcaagtttg aagagagata caagacaggc |
| 421 | aagaacaagt ggttcttcca gaaactgcgg ttttagatgc tttgttttga tcattaaaaa |

LOCUS NM_000990 4906 bp mRNA linear PRI 11-JAN-2014
DEFINITION Homo sapiens ribosomal protein L27a (RPL27A), mRNA.
(SEQ ID NO: 676)

| | |
|---|---|
| 1 | aacgaggccc ttagggtcgg cttaggcggt tccctgacca aggcgccaga aaagggcctg |
| 61 | gctcaagcaa gcacgggcgg cgtgcagtac agcacaccta gccccgattc ttcaacagtt |
| 121 | ctcgccctcc gagcctagca caacgagcct caccgaaacc gtacaccgcc accaggacac |
| 181 | tccgtgatgg gggatcacca ccctcagaaa gaggaagcga ctagcaggcg cgcaatcccg |
| 241 | cgagaccagg aggccccgcc cgaagcccgg cctctgtgac cggaagtgag gcgttttgcc |
| 301 | ccgcccccgt ggccgatacc tcgcgagact tggcgaaggc cttccttttt cgtctgggct |
| 361 | gccaacatgc catccagact gaggaagacc cggaaactta ggggccacgt gagccacggc |
| 421 | cacggccgca taggcaagca ccggaagcac cccggcggcc gcggtaatgc tggtggtctg |
| 481 | catcaccacc ggatcaactt cgacaaatac cacccaggct actttgggaa agttggtatg |
| 541 | aagcattacc acttaaagag gaaccagagc ttctgcccaa ctgtcaacct tgacaaattg |
| 601 | tggactttgg tcagtgaaca gacacgggtg aatgctgcta aaaacaagac tggggctgct |
| 661 | cccatcattg atgtggtgcg atcgggctac tacaaagttc tgggaaaggg aaagctccca |
| 721 | aagcagcctg tcatcgtgaa ggccaaattc ttcagcagaa gagctgagga gaagattaag |
| 781 | agtgttgggg gggcctgtgt cctggtggct tgaagccaca tggagggagt ttcattaaat |
| 841 | gctaactact ttttccttgt ggtgtgagtg taggttcttc agtggcacct ctacatcctg |
| 901 | tgtgcattgg gagcccaggt tctagtactt agggtatgaa gacatggggt cctctcctga |
| 961 | cttccctcaa atatatggta aacgtaagac caacacagac gttggccagt taaacatttc |
| 1021 | tgtttataaa gtcagaataa tacctgttga tcactgaaag gcctgcatgt attgtactct |
| 1081 | gaattttaca gtgaatgaga gaatgtaccc taattgttca acagggctca aaaggaaaga |
| 1141 | ttccattttg atgggtcaca ttctaaagag gggcagtgtg ataggaatga gatggtcctt |
| 1201 | taggacttaa gttctcagcc caaggttttt ccacgtggcc ccctcatctt tttttttttt |
| 1261 | ttaaacggag tctctcttgc caggctggag tgcagtggca cgatctcggc tcactgcagc |
| 1321 | ctccgcctcc caggttaagc gattctcctg cctcagcttc ctgactaact gggattacag |
| 1381 | gcgcccacca ccatgcccag ctaatttttg tattttcagt agagatgggg tttcaccatg |
| 1441 | ttggccatgc tggtctctaa ctcctaacct caagtgatct gcccacatcg gcctccaaaa |
| 1501 | gttctgggat tatagtgtga gccactgcgc ccggccatgg ctccttaatc ttgatccaaa |
| 1561 | ttattgttac atccagaatg tgatgaatca aaatctcgag atgggggtcc agcaatctga |
| 1621 | aatttcagta tgccagggct tttctgtatg tcaaagtggg tttgaaatag ttaatttttc |
| 1681 | ttctagtctg aaatgtatcg ggaaaatttg gaaatcctga aggctggaaa ttgaaataag |
| 1741 | tttttctagg atttgtgtct cttgctattg gaaaactgat ggtgaccaat tcatgtttac |
| 1801 | aaataagatc ctcatagatc tcggtaaatt ataatttgct acagttttat ggttcttcct |
| 1861 | gtgattttga gctttttttg acccaaaata atacagtcta aaactataga caaataagat |
| 1921 | ggcacttaga ctcctgggtt ttagttagtg gaggtttcct tagtgcactg tggggtcata |
| 1981 | ataagccgag aaccatggct gtctatggga cacatctgtc aggacaacct ttagaggatg |
| 2041 | ttggggatca aatagaaggc acagagaagc actgaattgg cttacataag aataggctag |
| 2101 | aattacaagt agtgaaacct cgattcagct ggacaatttt aaacaaatgt atcatttggc |
| 2161 | ttgtatcttc tgttgtgctg gagaagttag aaataagggc tctccagacc agcctgacca |
| 2221 | acctggagaa accttgtctc tactaaatac acaaaattag ccaggcgtgg tggcacatgc |
| 2281 | ctgtaatccc agctactttg gaggctgagc caggagaatc tccaggaggc ggaggttgct |
| 2341 | gtgagccgag atcgtgccat tgcactccag cttgggcaac aagagtgaaa ctctgtccac |
| 2401 | cccccccaaa aaaagtaagg gctctccatt agggcccata gaggacttgt aatatggaac |
| 2461 | ctgaatccaa ggatcccaca ataagtggtc agtagttcat gatgaattaa aagactcaat |
| 2521 | atttggtctt cacccaatac ctgtgtgact tttagtccta atttcctcat ctttaaaatt |
| 2581 | tcagtgaaag tgcctacctg aggattgtgt agattaaaat ggaaaccgtg cacttaattt |
| 2641 | tttgttttgt tttgagacgg agtctcgctc tgtcgcccag gctggagtgc agtggtgcga |
| 2701 | tctcagatca ctgcaagctc cgcctcctag gttcagacca ttctcctgcc tcagcttccc |
| 2761 | aagtagctgg gactacaggc gcccgccact gcgcccggct aattttttgc atttttagta |
| 2821 | gagacagggt ttcaccgtgt tagccaggat ggtctcgatc tcctgatctg cccgcctcag |
| 2881 | cctcccaaag tgctgggatt acaggcatga gccaccgcgc ccggcccagg cacttaattt |
| 2941 | ttgtgtttga cttagtaact taagtgcaaa ctattacggg agcagatgga gtcaattggc |
| 3001 | cttcatgtga ttgtcagtgg gaaattggtc caagcagagg gaatactggt tcaggaaact |
| 3061 | ggtttgggaa ggttaggcaa acgggaagtg ctatggtgga gagaaagatt actctggccg |
| 3121 | ggctgtaaag gacggctaca atgggaggct gaaggcagaa ccaagaaaat gggagtgagt |
| 3181 | atggaaaagg tacgattcag acggcataat ggacgggact tggagactga attgtagtgg |
| 3241 | gccgaccaca aaatgataag gcatggaagg aagtagagtt tggggggaag gatccctagt |
| 3301 | cccttaatgg ctaccttctt ccccaggagt tgttaggcca tccgatcccc tggcctggga |
| 3361 | aagaaacact gatttcgttg ctggcttgtt cactcaccag aagctacagc tactaacagt |
| 3421 | tctaaaaact gtttcatgtg atgaggaaca gacgaaaata gttttgagcc ctaagtccgc |
| 3481 | cgattccagt gctttcttga acccgcattt actaaaatat tttcatgact gccaagcttt |
| 3541 | gaatagcctg ctgtgttcat ggaggctcat actggcgatc tctagtggct ggctaaagct |
| 3601 | tgaattgcaa aagatctaat ttctggtcta atgtatatat gccttaaata tagttgcgtt |
| 3661 | caaacgtggg agctgcaggt gcaacttgat tttatgacaa atggctgcca cataatttgc |
| 3721 | acaagcagtg ctcgtcaagg gcagctaaat caggcgagct ttcaatcaaa ataaatgtac |
| 3781 | tactaaaccc tacttagcgg ctaactagcc caagagcaga cagcccacgg acggactgca |
| 3841 | agtcggaagc gcgggcggaa gctgtgcagc gcccacctgg tggctccatc ggccgcgttc |
| 3901 | atcagtcagc acgacccgac ctcagtggcg tcctcacaac acagaccgga ccttgggtct |
| 3961 | taccccggca cctgagaacc acttccggtg agtagcttct acttccggag acgatgactc |
| 4021 | ccccgcgtcc cagaccggaa gaagcccggc ggagaccggc ctcgctcggc cacttccggc |
| 4081 | aagggcggag ccggccagtg gtgcgcgagc gcagataact cccctggaga ggcgggatgt |
| 4141 | tcaactccac ccctggtcct tgggcggccg tgggtcccct tcgaagcgga ggaatggcca |
| 4201 | acctcgccgc acttcgagcc cctttagggt gcgtttaaga acagtgggcg tggcctttac |
| 4261 | gtaaatcttc gagatgggaa cctccagaat ttgtctcaat tgtctaaaag gtaatgagcg |
| 4321 | tcagcgacat tcaagggcac tttgggctaa aaaagaaagt gcttgtacac ggatggaaat |
| 4381 | attctagaag aacataaaag gaatttcctc ttaggaggtt agggaaatga gcacgaagta |
| 4441 | tgttttggtg cagttttttg ttcaacccaa tgcgtatttt catattgaga ggcaatataa |
| 4501 | atggagcgaa agtatcttga gaaaaaaaaa aaaactacca gaacttgccg ttgctgaaaa |
| 4561 | gtaatatttt ctctttcgag agttttcatg gccttttaaa ttacaccccc acctccacag |
| 4621 | gcaaataaat ttgttttgga atgcatacca catcatctgg ctctagaaac gtattttgtg |
| 4681 | tagctcccct agcaagaata taggttaaag cgtaaattta attcctggct ctattttaca |
| 4741 | tcccaatttt tcattttcctc tcattcccac tttacgttgt ttcaaataac ctagtttgtg |
| 4801 | tatccctgta agtcattttg gtataaagta ggttataagt gtacatgcga aaagatgttt |
| 4861 | ttaacaaaaa tgtaactgaa |

LOCUS NM_000991 4245 bp mRNA linear PRI 17-APR-2013
DEFINITION Homo sapiens ribosomal protein L28 (RPL28), transcript variant 2,
mRNA. (SEQ ID NO: 677)

| | |
|---|---|
| 1 | ctctttccgt ctcaggtcgc cgctgcgaag ggagccgccg ccatgtctgc gcatctgcaa |
| 61 | tggatggtcg tgcggaactg ctccagtttc ctgatcaaga ggaataagca gacctacagc |
| 121 | actgagccca ataacttgaa ggcccgcaat tccttccgct acaacggact gattcaccgc |
| 181 | aagactgtgg gcgtggagcc ggcagccgac ggcaaaggtg tcgtggtggt cattaagcgg |
| 241 | agatccggcc agcggaagcc tgccacctcc tatgtgcgga ccaccatcaa caagaatgct |
| 301 | cgcgccacgc tcagcagcat cagacacatg atccgcaaga acaagtaccg ccccgacctg |
| 361 | cgcatggcag ccatccgcag ggccagcgcc atcctgcgca gccagaagcc tgtgatggtg |
| 421 | aagaggaagc ggacccgccc caccaagagc tcctgagccc cctgccccca gagcaataaa |
| 481 | gtcagctggc tttctcacct gcctcgactg ggcctccctt tttgaaacgc tctggggagc |
| 541 | tctggccctg tgtgttgtca ttcaggccat gtcatcaaaa ctctgcatgt caccttgtcc |
| 601 | atctggaggt gatgtcaatg gctggccatg caggaggggt ggggtagctg ccttgtccct |
| 661 | ggtgagggca agggtcactg tcttcacaga aaaagtttgc tgacttgtga ttgagaccta |
| 721 | ctgtcccatt gtgaggtggc ctgaagaatc ccagctgggg cagtggcttc cattcagaag |
| 781 | aagaaaggcc ttttctagcc cagaagggtg caggctgagg gctgggccct gggccctggt |
| 841 | gctgtagcac ggtttgggga cttggggtgt tcccaagacc tgggggacga cagacatcac |
| 901 | gggaggaaga tgagatgact tttgcatcca gggagtgggt gcagccacat ttggagggga |
| 961 | tgggctttac ttgatgcaac ctcatctctg agatgggcaa cttggtgggt ggtggcttat |
| 1021 | aactgtaagg gagatggcag ccccagggta cagccagcag gcattgagca gccttagcat |
| 1081 | tgtcccccta ctcccgtcct ccaggtgtcc ccatccctcc cctgtctctt tgagctggct |
| 1141 | cttgtcactt aggtctcatc tcagtggccg ctcctgggcc accctgtcac ccaagctttc |
| 1201 | ctgattgccc agccctcttg tttcctttgg cctgtttgct ccctagtgtt tattacagct |
| 1261 | tgtgaggcca ggagtttgag accatcctag gcaacataat gagacaccgt ctctaaaata |
| 1321 | aaattagctg ggtgtggtgg tgcaccgcct gtggtcccag ctcctcagag gttgagtaga |
| 1381 | ggctgaggtg agcggagcac ttgagccaag agtatgaggc tgcagtgagc ccatgagccc |
| 1441 | caccactaca ctccagcctg gaagacacca tgacacacag tgaggcctgg atggggaaag |
| 1501 | agtcctgctg ttgatcctca catgtttcct gggcacctaa ctctgtcagc cactgccagg |
| 1561 | gaccaaggat ccagcatcca tggcacccct ggttcctgcc atcctggggt acccgattca |
| 1621 | aagaaggact ctgctccctg tctgagacca cccccggctc tgactgagag taaggggact |
| 1681 | gtcagggcct cgacttgcca ttggttgggg tcgtacgggg ctgggagccc tgcgttttga |
| 1741 | ggcagaccac tgcccttccg acctcagtcc tgtctgctcc agtcttgccc agctcgaagg |
| 1801 | agagcagatc tgaccacttg ccagcccctg tctgctgtga attaccattt cctttgtcct |
| 1861 | tcccttagtt gggtctatta gctcagattg agaggtgttg ccttaaaact gagttgggtg |
| 1921 | acttggtacc tgctcaggac cccccgcact gtcccaatcc cactcaggcc cacctccagc |
| 1981 | tggcctcact ccgctggtga cttcgtacct gctcaggagc ccccactgtc ccagtcccac |
| 2041 | tcaggcccat ctctggctgg cctcactgcg ctgggactcc gccttcataa ggagagctca |
| 2101 | ctgctcacgt tagtagatgg ccccttctcg tgaggcctct cccctggcac ctgcttcagt |
| 2161 | tgtcctccac agcactgatt tgcagcccac aagctggcag gtttatctgt ctcatgtttg |
| 2221 | tcttgtgctg gtgggcaagg ggtttgtcta gcacaccagc atataatgag atgcttgatg |
| 2281 | aatggtgcat attgaatgta taaagcccac cggtcctgag agtttgctca ctggagactt |
| 2341 | tctggagatg gagtctcgct ctgttgccca ggctggcgag tgcaatggcg cgatcttggc |
| 2401 | tcactgcagc ctccacctcc tgggttcaag cgattctcct gcctcagcct cccgagtagc |
| 2461 | tgggattaca ggtgggtgtc accacaccca gctcagtatt gtatttttag cagagatggg |
| 2521 | gtttcaccat tttgcccagg ctggtttgga actcctgact tcaaattacc cacctgcctc |
| 2581 | agcctcccaa agtgctggca ttacaggcgc tcgaggcttt ctgatgtggc tgctgctgct |
| 2641 | cagaaggcct tgtccttaac cacctccttg cctgccctgg aggcttgtgc ctctaggccc |
| 2701 | caccccctgt ggagtcctgc tggctttctc catccctatc tgaatcctcc ctgctgtgtg |
| 2761 | gcctcccctg gtctcatccg taacacagcc cagcttagtg ggcctctgtt cctgcgggtg |
| 2821 | gccagcctgt ctgtgtggct gggctgggga ggccacgtct ggtatctgaa tgctatcggt |
| 2881 | gggttggggt ggaggaacca ggagagggct ggagggaggg agatggtctc agccccacag |
| 2941 | agtttggagt cctcagtgtg ctgagcaaac gtggagacac catttccctc ctctagacct |
| 3001 | catcttggag agagagatgt tggatggggc catctattcc agctttattc acacaaatca |
| 3061 | tgtctgttgg cctggaaatt ggaaaaccag ttaaaccaaa aacatgatat taagaaaaca |
| 3121 | ggcaggctca ccatagtaaa aatgctgaaa gccaaagaca aaattgggag aacaaaagaa |
| 3181 | aagcgtcttg tcacatacag aaggtccctg ataaagttag tagctgccct catcagaaac |
| 3241 | caggcccagg cagtggggac acatccagag tgctgaaaga acctccccca ggtcatccta |
| 3301 | tccccaagag tgatgcccgg cagcattccc agctcagggc taatggttca cggaagccag |
| 3361 | gaatcaaact gcctgggttc cagtcccagc tctgccagtt atgcccagct gtggggactt |
| 3421 | gggcagctcg tttagtagca ccgtgcctca gtttcccata tgtaaaaggc cattttgagt |
| 3481 | gcctttcaca gccctgcata aggcaggtgt ctcagtgttc actgctgtct ctccagctct |
| 3541 | tagtccagta gctgcatggt gagtgagcgt agggcgcacc ctggaaggct gccaagccca |
| 3601 | aagttgtgca gagcgctggg gactccagac tccccacagc agcagagact cgggactgag |
| 3661 | gcatcctctg ttcacaggac atgctggcat ctactgggtc agggctctgc tgctcggtgg |
| 3721 | ctgtgcaacc ttgggcaagt tcctcaacct ctctgtgtct tcgtaccctc atctgtaaca |
| 3781 | tgcgtgtcga tagaccctac tactcagggt tgatgagaag attaaatgtg caaaacctgc |
| 3841 | ttgactgtgc ccacaaatcc tgattgtagg aataaattaa tgacttttta taaatatttt |
| 3901 | gatcagatgg actcatgatc acagatgtct tcacatgcct atgactaatt tgtacacaaa |
| 3961 | ctaatgctcg tgtttcccaa gcacctggaa gacatgccag atccatgtgc agtaatgcct |
| 4021 | ggtggctcca ggtctgcccc gccgtcctgt ggggctgtga gctttcccag cctcctgccc |
| 4081 | gtgtttgtga atatcattct gtcctcagct gcatttccag cccaggctgt ttggcgctgc |
| 4141 | ccaggaatgg tatcaattcc cctgtttctc ttgtagccag ttactagaat aaaatcatct |
| 4201 | actttaaaaa |

LOCUS NM_000992 737 bp mRNA linear PRI 10-JAN-2014
DEFINITION Homo sapiens ribosomal protein L29 (RPL29), mRNA. (SEQ ID NO: 678)

| | |
|---|---|
| 1 | ttccggcgtt gttgacccta tttcccgtgc tgcaccgcag cccctttctc ttccggttct |
| 61 | aggcgcttcg ggagccgcgg cttatggtgc agacatggcc aagtccaaga accacaccac |
| 121 | acacaaccag tcccgaaaat ggcacagaaa tggtatcaag aaaccccgat cacaaagata |
| 181 | cgaatctctt aagggggtgg accccaagtt cctgaggaac atgcgctttg ccaagaagca |
| 241 | caacaaaaag ggcctaaaga agatgcaggc caacaatgcc aaggccatga gtgcacgtgc |
| 301 | cgaggctatc aaggccctcg taaagcccaa ggaggttaag cccaagatcc caaagggtgt |
| 361 | cagccgcaag ctcgatcgac ttgcctacat tgcccacccc aagcttggga agcgtgctcg |
| 421 | tgcccgtatt gccaaggggc tcaggctgtg cggccaaag gccaaggcca aggccaaggc |
| 481 | caaggatcaa accaaggccc aggctgcagc cccagcttca gttccagctc aggctcccaa |
| 541 | acgtacccag gcccctacaa aggcttcaga gtagatatct ctgccaacat gaggacagaa |
| 601 | ggactggtgc gaccccccac ccccgcccct gggctaccat ctgcatgggg ctggggtcct |
| 661 | cctgtgctat ttgtacaaat aaacctgagg caggaaa |

LOCUS NM_000989 571 bp mRNA linear PRI 10-JAN-2014
DEFINITION Homo sapiens ribosomal protein L30 (RPL30), mRNA. (SEQ ID NO: 679)

| | |
|---|---|
| 1 | agttccggct ctgccgtgaa gagctttgca ttgtgggaag tctttccttt ctcgttcccc |
| 61 | ggccatctta gcggctgctg ttggttgggg gccgtcccgc tcctaaggca ggaagatggt |
| 121 | ggccgcaaag aagacgaaaa agtcgctgga gtcgatcaac tctaggctcc aactcgttat |
| 181 | gaaaagtggg aagtacgtcc tggggtacaa gcagactctg aagatgatca gacaaggcaa |
| 241 | agcgaaattg gtcattctcg ctaacaactg cccagctttg aggaaatctg aaatagagta |
| 301 | ctatgctatg ttggctaaaa ctggtgtcca tcactacagt ggcaataata ttgaactggg |
| 361 | cacagcatgc ggaaaatact acagagtgtg cacactggct atcattgatc caggtgactc |
| 421 | tgacatcatt agaagcatgc cagaacagac tggtgaaaag taaacctttt cacctacaaa |
| 481 | atttcacctg caaaccttaa acctgcaaaa ttttccttta ataaaatttg cttgttttaa |
| 541 | aaacattgta tcta |

LOCUS NM_000993 524 bp mRNA linear PRI 17-NOV-2013
DEFINITION Homo sapiens ribosomal protein L31 (RPL31), transcript variant 1,
mRNA. (SEQ ID NO: 680)

| | |
|---|---|
| 1 | tggcgacccg gaagttgtac ttgcaactgc ggctttcctt ctcccacaat ccttcgcgct |
| 61 | cttcctttcc aacttggacg ctgcagaatg gctcccgcaa agaagggtgg cgagaagaaa |
| 121 | aagggccgtt ctgccatcaa cgaagtggta acccgagaat acaccatcaa cattcacaag |
| 181 | cgcatccatg gagtgggctt caagaagcgt gcacctcggg cactcaaaga gattcggaaa |
| 241 | tttgccatga aggagatggg aactccagat gtgcgcattg acaccaggct caacaaagct |
| 301 | gtctgggcca aaggaataag gaatgtgcca taccgaatcc gtgtgcggct gtccagaaaa |
| 361 | cgtaatgagg atgaagattc accaaataag ctatatactt tggttaccta tgtacctgtt |
| 421 | accactttca aaaatctaca gacagtcaat gtggatgaga actaatcgct gatcgtcaga |
| 481 | tcaaataaag ttataaaatt gccttcaaaa |

LOCUS NM_000994 1668 bp mRNA linear PRI 11-JAN-2014
DEFINITION Homo sapiens ribosomal protein L32 (RPL32), transcript variant 1,
mRNA. (SEQ ID NO: 681)

| | |
|---|---|
| 1 | aggggttacg acccatcagc ccttgcgcgc caccgtccct tctctcttcc tcggcgctgc |
| 61 | ctacggaggt ggcagccatc tccttctcgg catcatggcc gccctcagac cccttgtgaa |
| 121 | gcccaagatc gtcaaaaaga gaaccaagaa gttcatccgg caccagtcag accgatatgt |
| 181 | caaaattaag cgtaactggc ggaaacccag aggcattgac aacagggttc gtagaagatt |
| 241 | caagggccag atcttgatgc ccaacattgg ttatggaagc aacaaaaaaa caaagcacat |
| 301 | gctgcccagt ggcttccgga agttcctggt ccacaacgtc aaggagctgg aagtgctgct |
| 361 | gatgtgcaac aaatcttact gtgccgagat cgctcacaat gtttcctcca agaaccgcaa |
| 421 | agccatcgtg gaaagagctg cccaactggc catcagagtc accaacccca atgccaggct |
| 481 | gcgcagtgaa gaaaatgagt aggcagctca tgtgcacgtt ttctgtttaa ataaatgtaa |
| 541 | aaactgccat ctggcatctt ccttccttga ttttaagtct tcagcttctt ggccaactta |
| 601 | gtttgccaca gagattgttc ttttgcttaa gcccctttgg aatctcccat ttggagggga |
| 661 | tttgtaaagg acactcagtc cttgaacagg ggaatgtggc ctcaagtgca cagactagcc |
| 721 | ttagtcatct ccagttgagg ctgggtatga ggggtacaga cttggccctc acaccaggta |
| 781 | ggttctgaga cacttgaaga agcttgtggc tcccaagcca caagtagtca ttcttagcct |
| 841 | tgcttttgta aagttaggtg acaagttatt ccatgtgatg cttgtgagaa ttgagaaaat |
| 901 | atgcatggaa atatccagat gaatttctta cacagattct tacgggatgc ctaaattgca |
| 961 | tcctgtaact tctgtccaaa aagaacagga tgatgtacaa attgctcttc caggtaatcc |
| 1021 | accacggtta actggaaaag cactttcagt ctcctataac cctcccacca gctgctgctt |
| 1081 | caggtataat gttacagcag tttgccaagg cggggaccta actggtgaca attgagcctc |
| 1141 | ttgactggta ctcagaattt agtgacacgt ggtcctgatt ttttttggag acggggtctt |
| 1201 | gctctcaccc aggctgggag tgcagtggca cactgactac agccttgacc tccccaggct |
| 1261 | caggtgatct tcccacctca gccttccaag tagctgggac tacagatgca cacctccaaa |
| 1321 | cctgggtagt ttttgaagtt tttttgtaga ggtggtctag ccatgttgcc taggctcccg |
| 1381 | aactcctgag ctcaagcaat cctgcttcag cctcccaaag tactgggatt acaggcatct |
| 1441 | tctgtagtat ataggtcatg agggatatgg gatgtggtac ttatgagaca gaaatgctta |
| 1501 | caggatgttt ttctgtaacc atcctggtca acttagcaga aatgctgcgc tgggtataat |
| 1561 | aaagcttttc tacttctagt ctagacagga atcttacaga ttgtctcctg ttcaaaacct |
| 1621 | agtcataaat atttataatg caaactggtc aaaaaaaaaa |

LOCUS NM_000995 918 bp mRNA linear PRI 26-JAN-2014
DEFINITION Homo sapiens ribosomal protein L34 (RPL34), transcript variant 1,
mRNA. (SEQ ID NO: 682)

| | |
|---|---|
| 1 | cttttttctt cctcttccgg ggacgttgtc tgcaggcact cagaatggtc cagcgtttga |
| 61 | cataccgacg taggctttcc tacaatacag cctctaacaa aactaggctg tcccgaaccc |
| 121 | ctggtaatag aattgtttac ctttatacca agaaggttgg gaaagcacca aaatctgcat |
| 181 | gtggtgtgtg cccaggcaga cttcgagggg ttcgtgctgt aagacctaaa gttcttatga |
| 241 | gattgtccaa aacaaagaaa catgtcagca gggcctatgg tggttccatg tgtgctaaat |
| 301 | gtgttcgtga caggatcaag cgtgctttcc ttatcgagga gcagaaaatc gttgtgaaag |
| 361 | tgttgaaggc acaagcacag agtcagaaag ctaaataaaa aaatgaaact tttttgagta |
| 421 | ataaaaatga aaagacgctg tccaatagaa aaagttggtg tgctggagct acctcacctc |
| 481 | agcttgagag agccagttgt gtgcatctct ttccagtttt gcatccagtg acgtctgctt |
| 541 | ggcatcttga gattgttatg gtgagagtat ttacacctca gcaaatgctg caaaatcctg |
| 601 | ttttccccca gagagctgga ggttaaatac taccagcaca tccctagata ctactcaagt |
| 661 | tacagtatat gatcactaat atagtatgct cttggtacca ggagctctga tatatatctg |
| 721 | gtacatgttt gataatgact tgattgttat tataagtact tattaatact tcgattctgt |
| 781 | aaagagttta gggtttgatt ttataaaatc caaaatgagc cttttattga atccagttct |
| 841 | ctatgtgacc agttctctgt atgaatggaa gggaaaagaa ttaaaaatct tgcaaagggg |

LOCUS NM_007209 475 bp mRNA linear PRI 26-JAN-2014
DEFINITION Homo sapiens ribosomal protein L35 (RPL35), mRNA. (SEQ ID NO: 683)

| | |
|---|---|
| 1 | cttcctcttt ccctcggagc gggcggcggc gttggcggct tgtgcagcaa tggccaagat |
| 61 | caaggctcga gatcttcgcg ggaagaagaa ggaggagctg ctgaaacagc tggacgacct |
| 121 | gaaggtggag ctgtcccagc tgcgcgtcgc caaagtgaca ggcggtgcgg cctccaagct |
| 181 | ctctaagatc cgagtcgtcc ggaaatccat tgcccgtgtt ctcacagtta ttaaccagac |
| 241 | tcagaaagaa aacctcagga aattctacaa gggcaagaag tacaagcccc tggacctgcg |
| 301 | gcctaagaag acacgtgcca tgcgccgccg gctcaacaag cacgaggaga acctgaagac |
| 361 | caagaagcag cagcggaagg agcggctgta cccgctgcgg aagtacgcgg tcaaggcctg |
| 421 | aggggcgcat tgtcaataaa gcacagctgg ctgagactgc |

LOCUS NM_033643 453 bp mRNA linear PRI 26-JAN-2014
DEFINITION Homo sapiens ribosomal protein L36 (RPL36), transcript variant 1,
mRNA. (SEQ ID NO: 684)

| | |
|---|---|
| 1 | gagtagatat cccggagttc cgcgcggcgc cagcccttcc gccacggccg tctctggaga |
| 61 | gcagcagcca tggccctacg ctaccctatg gccgtgggcc tcaacaaggg ccacaaagtg |
| 121 | accaagaacg tgagcaagcc caggcacagc cgacgccgcg ggcgtctgac caaacacacc |
| 181 | aagttcgtgc gggacatgat tcgggaggtg tgtggctttg ccccgtacga gcggcgcgcc |
| 241 | atggagttac tgaaggtctc caaggacaaa cgggccctca aatttatcaa gaaaagggtg |
| 301 | gggacgcaca tccgcgccaa gaggaagcgg gaggagctga gcaacgtact ggccgccatg |
| 361 | aggaaagctg ctgccaagaa agactgagcc cctcccctgc cctctccctg aaataaagaa |
| 421 | cagcttgaca gaaaa |

LOCUS NM_021029 881 bp mRNA linear PRI 27-JUN-2013
DEFINITION Homo sapiens ribosomal protein L36a (RPL36A), transcript variant
1, mRNA. (SEQ ID NO: 685)

| | |
|---|---|
| 1 | gagtcctctc agccgcccga gggcgctgcg ctgagcctta cactctatga ttgctcctac |
| 61 | cgactcccat gaggaagtgc gatcgggaac ctcctatata cttccgtttg cctcgcggtt |
| 121 | tctttctttc cgcgccgata gcgctcacgc aagcatggtt aacgtcccta aaacccgccg |
| 181 | gactttctgt aagaagtgtg gcaagcacca accccataaa gtgacacagt acaagaaggg |
| 241 | caaggattct ctgtacgccc agggaaagcg gcgttatgac aggaagcaga gtggctatgg |
| 301 | tgggcaaact aagccgattt tccggaaaaa ggctaaaact acaaagaaga ttgtgctaag |
| 361 | gcttgagtgc gttgagccca actgcagatc taagagaatg ctggctatta aaagatgcaa |
| 421 | gcattttgaa ctgggaggag ataagaagag aaagggccaa gtgatccagt tctaagtgtc |
| 481 | atcttttatt atgaagacaa taaaatcttg agtttatgtt cacttcattt gtttgctgtt |
| 541 | catcttttgg gagggaataa gctagagcca tcaatacaat tccgcttgtg gggaaattta |
| 601 | tgcctcttac tggtactact tgttttgcat tgaagctgac tggttgagtt cacatcatat |
| 661 | gttgcaattt tctaatttgg cacttcaatc actaggggcc ttatgaggca gtttgtcatt |
| 721 | atgcaatggt tattggttat catgtgagta gacacatttc aggctaatag ggagaagtca |
| 781 | gtaacacatt catagtgaat atgagatgtc tttgctaaga gttaagtgtc agatctttgt |
| 841 | tataacagtt aatttaataa agaattttgg cattgttctt c |

LOCUS NM_000997 1586 bp mRNA linear PRI 26-JAN-2014
DEFINITION Homo sapiens ribosomal protein L37 (RPL37), mRNA. (SEQ ID NO: 686)

| | |
|---|---|
| 1 | gcgccccgca ggaagtgctt ccctgggcgg aagcttctga gcgtgatata gcggaagtgc |
| 61 | cttctcttcc ggtctttctg gtctcggccg cagaagcgag atgacgaagg gaacgtcatc |
| 121 | gtttggaaag cgtcgcaata agacgcacac gttgtgccgc cgctgtggct ctaaggccta |
| 181 | ccaccttcag aagtcgacct gtggcaaatg tggctaccct gccaagcgca agagaaagta |
| 241 | taactggagt gccaaggcta aaagacgaaa taccaccgga actggtcgaa tgaggcacct |
| 301 | aaaaattgta taccgcagat tcaggcatgg attccgtgaa ggaacaacac ctaaacccaa |
| 361 | gagggcagct gttgcagcat ccagttcatc ttaagaatgt caacgattag tcatgcaata |
| 421 | aatgttctgg ttttaaaaaa tacatatctg gttttggtaa ggtattttta atcaattagg |
| 481 | cttgtagtat cagtgaaata ctgtaggttt agggactggg ctagcttcat atcagattta |
| 541 | cttgttaagt gactgttttg gaatgtttac ttttggactg ggtttgtaac acggttaaag |
| 601 | gcaatgagaa acaagcagaa ttccaggagt ccttgaagca gagggcactg gaagacaata |
| 661 | tagcagatta aaatagcaca gctcatgtgg cataggtggg tattttagat gtttgagtaa |
| 721 | atttgaaaga gtatgatgtt taaattacct ttagcaacat gttcatctgc tatgctgtca |
| 781 | tgactagggg gatgattatt agtcacatag agcttgggag taccactgga aacgtatggg |
| 841 | taggagttta ggtggcttct gtttttcaaa agatgatctt atcctagtat ctgtaatgct |
| 901 | cacttggcac acctgacttg tgggctgtgt gtaaggtggc tagctaagtg aaaaaagcct |
| 961 | gctaggtgtg agtcaactta agaatatgta aataggtttg agaaaaagta gggcttgggt |
| 1021 | gcaagtaaag attgagcagg aaataaagga aaatcaagta taatccctga gatttgtaga |
| 1081 | ctaaaggcaa tgatgtggga ctacttggtc gaattttttt agccctcaac ttggtaattg |
| 1141 | ggtgtttctg tgttaaagca ctgaaacttg ctgtcgtgcc ttcctagttt tcgtggttta |
| 1201 | ttgacagggt tgggggtttt ttttgttttt ttaaaatgaa gggacaaagt caactggact |
| 1261 | gctgagtgag agggcagggg cagttgaagg gaacatgaat tgctggaaca gctacataaa |
| 1321 | atagtgatgt agccaagtca tgctatttaa attataattc tccactgtgt ttagaataac |
| 1381 | atctgaggtt cttaacctgg ccttggaagg gtatcacttt tacttgtaac ctggaatggc |
| 1441 | tttataatgt gctagctaat tgctactctc atcttgtatt ttaactccta atttaccctt |
| 1501 | caggtctcag cttcagaaca ttcacttata aagaaaccct gctgattaaa tctctcttgg |
| 1561 | gcttcctccc aaaa |

LOCUS NM_000998 434 bp mRNA linear PRI 17-APR-2013
DEFINITION Homo sapiens ribosomal protein L37a (RPL37A), mRNA. (SEQ ID NO: 687)

| | |
|---|---|
| 1 | acttccgctc gtccgcctaa taccgcgcct gcgcaccgcg tctcttcctt tctgggctcg |
| 61 | gacctaggtc gcggcgacat ggccaaacgt accaagaaag tcgggatcgt cggtaaatac |
| 121 | gggacccgct atggggcctc cctccggaaa atggtgaaga aaattgaaat cagccagcac |
| 181 | gccaagtaca cttgctcttt ctgtggcaaa accaagatga agagacgagc tgtggggatc |
| 241 | tggcactgtg gttcctgcat gaagacagtg gctggcggtg cctggacgta caataccact |
| 301 | tccgctgtca cggtaaagtc cgccatcaga agactgaagg agttgaaaga ccagtagacg |
| 361 | ctcctctact ctttgagaca tcactggcct ataataaatg ggttaattta tgtaacaaaa |

LOCUS NM_000999 411 bp mRNA linear PRI 17-APR-2013
DEFINITION Homo sapiens ribosomal protein L38 (RPL38), transcript variant 1,
mRNA. (SEQ ID NO: 688)

| | |
|---|---|
| 1 | gcccggaaac ggaagtctcg ttctttttcg tccttttccc cggttgctgc ttgctgtgag |
| 61 | tgtctctagg gtgatacgtg ggtgagaaag gtcctggtcc gcgccagagc ccagcgcgcc |
| 121 | tcgtcgccat gcctcggaaa attgaggaaa tcaaggactt cctgctcaca gcccgacgaa |
| 181 | aggatgccaa atctgtcaag atcaagaaaa ataaggacaa cgtgaagttt aaagttcgat |
| 241 | gcagcagata cctttacacc ctggtcatca ctgacaaaga gaaggcagag aaactgaagc |
| 301 | agtccctgcc ccccggtttg gcagtgaagg aactgaaatg aaccagacac actgattgga |
| 361 | actgtattat attaaaatac taaaaatcct aaa |

LOCUS NM_001000 439 bp mRNA linear PRI 11-JAN-2014
DEFINITION Homo sapiens ribosomal protein L39 (RPL39), mRNA. (SEQ ID NO: 689)

| | |
|---|---|
| 1 | gccttctaag ctcgttcttc cgccagcttc cctcctcttc ctttctccgc catcgtggtg |
| 61 | tgttcttgac tccgctgctc gccatgtctt ctcacaagac tttcaggatt aagcgattcc |
| 121 | tggccaagaa acaaaagcaa aatcgtccca ttccccagtg gattcggatg aaaactggaa |
| 181 | ataaaatcag gtacaactcc aaaaggagac attggagaag aaccaagctg ggtctataag |
| 241 | gaattgcaca tgagatggca cacatattta tgctgtctga aggtcacgat catgttacca |
| 301 | tatcaagctg aaaatgtcac cactatctgg agatttcgac gtgttttcct ctctgaatct |
| 361 | gttatgaaca cgttggttgg ctggattcag taataaatat gtaaggcctt tctttttaaa |

LOCUS NM_021104 478 bp mRNA linear PRI 26-JAN-2014
DEFINITION Homo sapiens ribosomal protein L41 (RPL41), transcript variant 1,
mRNA. (SEQ ID NO: 690)

| | |
|---|---|
| 1 | acccggcgct ccattaaata gccgtagacg gaacttcgcc tttctctcgg ccttagcgcc |
| 61 | atttttttgg aaacctctgc gccatgagag ccaagtggag gaagaagcga atgcgcaggc |
| 121 | tgaagcgcaa aagaagaaag atgaggcaga ggtccaagta aaccgctagc ttgttgcacc |
| 181 | gtggaggcca caggagcaga aacatggaat gccagacgct ggggatgctg gtacaagttg |
| 241 | tgggactgca tgctactgtc tagagcttgt ctcaatggat ctagaacttc atcgccctct |
| 301 | gatcgccgat cacctctgag acccaccttg ctcataaaca aaatgcccat gttggtcctc |
| 361 | tgccctggac ctgtgacatt ctggactatt tctgtgttta tttgtggccg agtgtaacaa |
| 421 | ccatataata aatcacctct tccgctgttt tagctgaaga attaaatcaa |

LOCUS NM_032477 632 bp mRNA linear PRI 22-SEP-2013
DEFINITION Homo sapiens mitochondrial ribosomal protein L41 (MRPL41), mRNA.
(SEQ ID NO: 691)

| | |
|---|---|
| 1 | gcggccgcgg ccaatcggag ccgctcttgc tgcgacgcag cggtcggaag cggagcaagg |
| 61 | tcgaggccgg gttggcgccg gagccggggc cgcttggagc tcgtgtgggg tctccggtcc |
| 121 | agggcgcggc atgggcgtcc tggccgcagc ggcgcgctgc ctggtccggg gtgcggaccg |
| 181 | aatgagcaag tggacgagca agcggggccc gcgcagcttc aggggccgca agggccgggg |
| 241 | cgccaagggc atcggcttcc tcacctcggg ctggaggttc gtgcagatca aggagatggt |
| 301 | cccggagttc gtcgtcccgg atctgaccgg cttcaagctc aagccctacg tgagctacct |
| 361 | cgcccctgag agcgaggaga cgcccctgac ggccgcgcag ctcttcagcg aagccgtggc |
| 421 | gcctgccatc gaaaaggact tcaaggacgg taccttcgac cctgacaacc tggaaaagta |
| 481 | cggcttcgag cccacacagg agggaaagct cttccagctc taccccagga acttcctgcg |
| 541 | ctagctgggc gggggagggg cggcctgccc tcatctcatt tctattaaac gcctttgcca |
| 601 | gctaaa |

LOCUS NM_002295 1155 bp mRNA linear PRI 26-JAN-2014
DEFINITION Homo sapiens ribosomal protein SA (RPSA), transcript variant 1,
mRNA. (SEQ ID NO: 692)

| | |
|---|---|
| 1 | cgcctgtctt ttccgtgcta cctgcagagg ggtccatacg gcgttgttct ggattcccgt |
| 61 | cgtaacttaa agggaaattt tcacaatgtc cggagccctt gatgtcctgc aaatgaagga |
| 121 | ggaggatgtc cttaagttcc ttgcagcagg aacccactta ggtggcacca atcttgactt |
| 181 | ccagatggaa cagtacatct ataaaaggaa aagtgatggc atctatatca taaatctcaa |
| 241 | gaggacctgg gagaagcttc tgctggcagc tcgtgcaatt gttgccattg aaaaccctgc |
| 301 | tgatgtcagt gttatatcct ccaggaatac tggccagagg gctgtgctga agtttgctgc |
| 361 | tgccactgga gccactccaa ttgctggccg cttcactcct ggaaccttca ctaaccagat |
| 421 | ccaggcagcc ttccgggagc cacggcttct tgtggttact gaccccaggg ctgaccacca |
| 481 | gcctctcacg gaggcatctt atgttaacct acctaccatt gcgctgtgta acacagattc |
| 541 | tcctctgcgc tatgtggaca ttgccatccc atgcaacaac aagggagctc actcagtggg |
| 601 | tttgatgtgg tggatgctgg ctcgggaagt tctgcgcatg cgtggcacca tttcccgtga |
| 661 | acacccatgg gaggtcatgc ctgatctgta cttctacaga gatcctgaag agattgaaaa |
| 721 | agaagagcag gctgctgctg agaaggcagt gaccaaggag gaatttcagg gtgaatggac |
| 781 | tgctcccgct cctgagttca ctgctactca gcctgaggtt gcagactggt ctgaaggtgt |
| 841 | acaggtgccc tctgtgccta ttcagcaatt ccctactgaa gactggagcg ctcagcctgc |
| 901 | cacggaagac tggtctgcag ctcccactgc tcaggccact gaatgggtag gagcaaccac |
| 961 | tgactggtct taagctgttc ttgcataggc tcttaagcag catggaaaaa tggttgatgg |
| 1021 | aaaataaaca tcagtttcta aaagttgtct tcatttagtt tgctttttac tccagatcag |
| 1081 | aatacctggg attgcatatc aaagcataat aataaataca tgtctcgaca tgagttgtac |
| 1141 | ttctaaaaaa |

LOCUS NM_002952 962 bp mRNA linear PRI 19-JAN-2014
DEFINITION Homo sapiens ribosomal protein S2 (RPS2), mRNA. (SEQ ID NO: 693)

| | |
|---|---|
| 1 | cttcttttcc gacaaaacac caaatggcgg atgacgccgg tgcagcgggg gggcccgggg |
| 61 | gccctggtgg ccctgggatg gggaaccgcg gtggcttccg cggaggtttc ggcagtggca |
| 121 | tccggggccg gggtcgcggc cgtggacggg gccggggccg aggccgcgga gctcgcggag |
| 181 | gcaaggccga ggataaggag tggatgcccg tcaccaagtt gggccgcttg gtcaaggaca |
| 241 | tgaagatcaa gtccctggag gagatctatc tcttctccct gcctattaag gaatcagaga |
| 301 | tcattgattt cttcctgggg gcctctctca aggatgaggt tttgaagatt atgccagtgc |
| 361 | agaagcagac ccgtgccggc cagcgcacca ggttcaaggc atttgttgct atcggggact |
| 421 | acaatggcca cgtcggtctg ggtgttaagt gctccaagga ggtggccacc gccatccgtg |
| 481 | gggccatcat cctggccaag ctctccatcg tccccgtgcg cagaggctac tgggggaaca |
| 541 | agatcggcaa gccccacact gtcccttgca aggtgacagg ccgctgcggc tctgtgctgg |
| 601 | tacgcctcat ccctgcaccc aggggcactg gcatcgtctc cgcacctgtg cctaagaagc |
| 661 | tgctcatgat ggctggtatc gatgactgct acacctcagc ccggggctgc actgccaccc |
| 721 | tgggcaactt cgccaaggcc acctttgatg ccatttctaa gacctacagc tacctgaccc |
| 781 | ccgacctctg gaaggagact gtattcacca agtctcccta tcaggagttc actgaccacc |
| 841 | tcgtcaagac ccacaccaga gtctccgtgc agcggactca ggctccagct gtggctacaa |
| 901 | catagggttt ttatacaaga aaaataaagt gaattaagcg tg |

LOCUS NM_001005 2108 bp mRNA linear PRI 19-JAN-2014
DEFINITION Homo sapiens ribosomal protein S3 (RPS3), transcript variant 1,
mRNA. (SEQ ID NO: 694)

| | |
|---|---|
| 1 | atactcactt ccgcccgcga gccacttcct ttcctttcag cggagcgcgg cggcaagatg |
| 61 | gcagtgcaaa tatccaagaa gaggaagttt gtcgctgatg gcatcttcaa agctgaactg |
| 121 | aatgagtttc ttactcggga gctggctgaa gatggctact ctggagttga ggtgcgagtt |
| 181 | acaccaacca ggacagaaat cattatctta gccaccagaa cacagaatgt tcttggtgag |
| 241 | aagggccggc ggattcggga actgactgct gtagttcaga agaggtttgg ctttccagag |
| 301 | ggcagtgtag agctttatgc tgaaaaggtg gccactagag gtctgtgtgc cattgcccag |
| 361 | gcagagtctc tgcgttacaa actcctagga gggcttgctg tgcggagggc ctgctatggt |
| 421 | gtgctgcggt tcatcatgga gagtggggcc aaaggctgcg aggttgtggt gtctgggaaa |
| 481 | ctccgaggac agagggctaa atccatgaag tttgtggatg gcctgatgat ccacagcgga |
| 541 | gaccctgtta actactacgt tgacactgct gtgcgccacg tgttgctcag acagggtgtg |
| 601 | ctgggcatca aggtgaagat catgctgccc tgggacccaa ctggtaagat tggccctaag |
| 661 | aagcccctgc ctgaccacgt gagcattgtg gaacccaaag atgagatact gcccaccacc |
| 721 | cccatctcag aacagaaggg tgggaagcca gagccgcctg ccatgcccca gccagtcccc |
| 781 | acagcataac agggtctcct tggcagctgt attctggagt ctggatgttg ctctctaaag |
| 841 | acctttaata aaattttgta caaagacaca aggtctgact agactgttca gtattcagac |
| 901 | tgaggggcat gttggcctct ggagcattac atatcttctt ggttttaacc atacttgtgg |
| 961 | tatttgcaag ggccagaaca gtaagaccca agcagagcca accagagaaa taatatttgt |
| 1021 | gtgatagaga aggctgatag caagcaaggc agcaccttga ttcgttgtcc tgtagttcag |
| 1081 | gattgtaggt ttagaagagg gatatgtttg agtttttcct atgcataagg cgatccacgt |
| 1141 | tgcacataga aagtgaatat aaatggccat tatattttgt gtcatgctgt gctctaagtg |
| 1201 | ttctttacat atgtactcgt taatcaacct ctctaaagtg taaaggaaat ttgcttgcac |
| 1261 | cactgaaggc acataaggct cagaagtaaa tttgcctaag cagtataaag ctatcattag |
| 1321 | aatccacatt cctaagttgt gttctcttag gggatcatgg aaccagtcat tggtactaca |
| 1381 | ggctattatg ttctggagaa ctgtgaagaa catttaaatt gtctctgatt ttatctatca |
| 1441 | atgttttgaa gtattttcta ccagtgtctg tacttcacaa gaaattcggc actatttttt |
| 1501 | caggcaaaac tagtgaggga caggttggct tgaaaatcat gagactgttg ttaaatcaga |
| 1561 | tgctggttga tcacagaggg gacttccagg gaaagctgtt atcaggtggc tgcttcctgg |
| 1621 | tgatgcagcc tggctgatga gataaccctg gctccacaga tggcttagca ggtgctgtga |
| 1681 | tgatttggtt ttcttctcaa ttagactgag ctgcacatgg tgtttatatt gcttggcaca |
| 1741 | tggtaagggc ttaatatttg aggtaattat gtagggcgta cactgacaag tatctgaccc |
| 1801 | ccccttcctt tttgactcat aaattggtca tcttaaccat ttaagtgtac acttctatag |
| 1861 | tgacagagtt agccctctgt ccaagggatt tgcatctgtg gattcaacca actttgggtc |
| 1921 | aaaaataatc aaaaaggatg gttgtgtgtg tattgaacat gtagacttat ttttcttatt |
| 1981 | ttcaaaatac tatattttct tgtcacttat tttcttgtac actgcagttg taacagctat |
| 2041 | gtagcatgta cattaggtat taaaagtaat ccagtgaaga ttgaaagtct aaaa |

LOCUS NM_001006 950 bp mRNA linear PRI 17-APR-2013
DEFINITION Homo sapiens ribosomal protein S3A (RPS3A), transcript variant 1,
mRNA. (SEQ ID NO: 695)

| | |
|---|---|
| 1 | tagacggcgc gccccgcccc cgtacgccta agttctcgcg cgactcccac ttccgccctt |
| 61 | ttggctctct gaccagcacc atggcggttg gcaagaacaa gcgccttacg aaaggcggca |
| 121 | aaaagggagc caagaagaaa gtggttgatc cattttctaa gaaagattgg tatgatgtga |
| 181 | aagcacctgc tatgttcaat ataagaaata ttggaaagac gctcgtcacc aggacccaag |
| 241 | gaaccaaaat tgcatctgat ggtctcaagg gtcgtgtgtt tgaagtgagt cttgctgatt |
| 301 | tgcagaatga tgaagttgca tttagaaaat tcaagctgat tactgaagat gttcagggta |
| 361 | aaaactgcct gactaacttc catggcatgg atcttacccg tgacaaaatg tgttccatgg |
| 421 | tcaaaaaatg gcagacaatg attgaagctc acgttgatgt caagactacc gatggttact |
| 481 | tgcttcgtct gttctgtgtt ggttttacta aaaaacgcaa caatcagata cggaagacct |
| 541 | cttatgctca gcaccaacag gtccgccaaa tccggaagaa gatgatggaa atcatgaccc |
| 601 | gagaggtgca gacaaatgac ttgaaagaag tggtcaataa attgattcca gacagcattg |
| 661 | gaaaagacat agaaaaggct tgccaatcta tttatcctct ccatgatgtc ttcgttagaa |
| 721 | aagtaaaaat gctgaagaag cccaagtttg aattgggaaa gctcatggag cttcatggtg |
| 781 | aaggcagtag ttctggaaaa gccactggag acgagacagg tgctaaagtt gaacgagctg |
| 841 | atagatatga accaccaatc caagaatctg tttaaagttc agacttcaaa tagtggcaaa |
| 901 | taaaaaatgc tatttgtgat ggtttgcttc tga |

LOCUS NM_001007 956 bp mRNA linear PRI 11-JAN-2014
DEFINITION Homo sapiens ribosomal protein S4, X-linked (RPS4X), mRNA.
(SEQ ID NO: 696)

| | |
|---|---|
| 1 | gggcggagca gctgaaaatc cggcgcgcgc agtctccagc cccaatttct acgcgcaccg |
| 61 | gaagacggag gtcctctttc cttgcctaac gcagccatgg ctcgtggtcc caagaagcat |
| 121 | ctgaagcggg tggcagctcc aaagcattgg atgctggata aattgaccgg tgtgtttgct |
| 181 | cctcgtccat ccaccggtcc ccacaagttg agagagtgtc tccccctcat cattttcctg |
| 241 | aggaacagac ttaagtatgc cctgacagga gatgaagtaa agaagatttg catgcagcgg |
| 301 | ttcattaaaa tcgatggcaa ggtccgaact gatataacct accctgctgg attcatggat |
| 361 | gtcatcagca ttgacaagac gggagagaat ttccgtctga tctatgacac caagggtcgc |
| 421 | tttgctgtac atcgtattac acctgaggag gccaagtaca agttgtgcaa agtgagaaag |
| 481 | atctttgtgg gcacaaaagg aatccctcat ctggtgactc atgatgcccg caccatccgc |
| 541 | taccccgatc ccctcatcaa ggtgaatgat accattcaga ttgatttgga gactggcaag |
| 601 | attactgatt tcatcaagtt cgacactggt aacctgtgta tggtgactgg aggtgctaac |
| 661 | ctaggaagaa ttggtgtgat caccaacaga gagaggcacc ctggatcttt tgacgtggtt |
| 721 | cacgtgaaag atgccaatgg caacagcttt gccactcgac tttccaacat ttttgttatt |
| 781 | ggcaagggca acaaaccatg gatttctctt ccccgaggaa agggtatccg cctcaccatt |
| 841 | gctgaagaga gagacaaaag actggcggcc aaacagagca gtgggtgaaa tgggtccctg |
| 901 | ggtgacatgt cagatctttg tacgtaatta aaaatattgt ggcaggatta atagca |

LOCUS NM_001008 910 bp mRNA linear PRI 26-JAN-2014
DEFINITION Homo sapiens ribosomal protein S4, Y-linked 1 (RPS4Y1), mRNA.
(SEQ ID NO: 697)

| | |
|---|---|
| 1 | gcaccggaaa agaacagatt ctcttccgtc gcagagtttc gccatggccc ggggccccaa |
| 61 | gaagcactta aagcgtgttg cagcgccgaa gcattggatg cttgacaaac taacgggtgt |
| 121 | atttgcacct cgtccatcga caggtcccca caagctgagg gaatgtcttc ctctgatcgt |
| 181 | cttcctcagg aatagactca agtatgcgtt gactggagat gaggtaaaga agatatgtat |
| 241 | gcaacgtttc atcaaaattg atggcaaggt tcgagtggat gtcacatacc ctgctggatt |
| 301 | catggatgtc atcagcatcg agaagacagg tgaacatttc cgcctggtct atgacaccaa |
| 361 | gggccgtttt gctgttcacc gcatcacagt ggaagaggca aagtacaagt tgtgcaaagt |
| 421 | gaggaagatt actgtgggag tgaagggaat ccctcacctg gtgactcatg atgctcgaac |
| 481 | catccgctac ccagatcctg tcatcaaggt gaacgatact gtgcagattg atttagggac |
| 541 | tggcaagata atcaacttta tcaaatttga tacaggcaat ttgtgtatgg tgattggtgg |
| 601 | agccaacctc ggtcgtgttg gtgtgatcac caacagggaa agacatcctg gttcttttga |
| 661 | tgtggtgcat gtgaaggatg ccaatggcaa cagctttgcc acgaggcttt ccaacatttt |
| 721 | tgtcattggc aatggcaata aaccttggat ttccctgccc aggggaaagg gcattcgact |
| 781 | tactgttgct gaagagagag ataagaggct ggccaccaaa cagagcagtg gctaaattgc |
| 841 | agtagcagca tatctttttt tctttgcaca aataaacagt gaattctcgt ttcttaaaaa |

LOCUS NM_001009 755 bp mRNA linear PRI 17-APR-2013
DEFINITION Homo sapiens ribosomal protein S5 (RPS5), mRNA. (SEQ ID NO: 698)

| | |
|---|---|
| 1 | ctcttcctgt ctgtaccagg gcggcgcgtg gtctacgccg agtgacagag acgctcaggc |
| 61 | tgtgttctca ggatgaccga gtgggagaca gcagcaccag cggtggcaga gaccccagac |
| 121 | atcaagctct ttgggaagtg gagcaccgat gatgtgcaga tcaatgacat ttccctgcag |
| 181 | gattacattg cagtgaagga gaagtatgcc aagtacctgc ctcacagtgc agggcggtat |
| 241 | gccgccaaac gcttccgcaa agctcagtgt cccattgtgg agcgcctcac taactccatg |
| 301 | atgatgcacg gccgcaacaa cggcaagaag ctcatgactg tgcgcatcgt caagcatgcc |
| 361 | ttcgagatca tacacctgct cacaggcgag aaccctctgc aggtcctggt gaacgccatc |
| 421 | atcaacagtg gtccccggga ggactccaca cgcattgggc gcgccgggac tgtgagacga |
| 481 | caggctgtgg atgtgtcccc cctgcgccgt gtgaaccagg ccatctggct gctgtgcaca |
| 541 | ggcgctcgtg aggctgcctt ccggaacatt aagaccattg ctgagtgcct ggcagatgag |
| 601 | ctcatcaatg ctgccaaggg ctcctcgaac tcctatgcca ttaagaagaa ggacgagctg |
| 661 | gagcgtgtgg ccaagtccaa ccgctgattt tcccagctgc tgcccaataa acctgtctgc |
| 721 | cctttggggc agtcccagcc aaaa |

LOCUS NM_001010 829 bp mRNA linear PRI 10-JAN-2014
DEFINITION Homo sapiens ribosomal protein 36 (RPS6), mRNA. (SEQ ID NO: 699)

| | |
|---|---|
| 1 | cctcttttcc gtggcgcctc ggaggcgttc agctgcttca agatgaagct gaacatctcc |
| 61 | ttcccagcca ctggctgcca gaaactcatt gaagtggacg atgaacgcaa acttcgtact |
| 121 | ttctatgaga agcgtatggc cacagaagtt gctgctgacg ctctgggtga agaatggaag |
| 181 | ggttatgtgg tccgaatcag tggtgggaac gacaaacaag gtttccccat gaagcagggt |
| 241 | gtcttgaccc atggccgtgt ccgcctgcta ctgagtaagg ggcattcctg ttacagacca |
| 301 | aggagaactg gagaaagaaa gagaaaatca gttcgtggtt gcattgtgga tgcaaatctg |
| 361 | agcgttctca acttggttat tgtaaaaaaa ggagagaagg atattcctgg actgactgat |
| 421 | actacagtgc ctcgccgcct gggccccaaa agagctagca gaatccgcaa acttttcaat |
| 481 | ctctctaaag aagatgatgt ccgccagtat gttgtaagaa agcccttaaa taaagaaggt |
| 541 | aagaaaccta ggaccaaagc acccaagatt cagcgtcttg ttactccacg tgtcctgcag |
| 601 | cacaaacggc ggcgtattgc tctgaagaag cagcgtacca agaaaaataa agaagaggct |
| 661 | gcagaatatg ctaaactttt ggccaagaga atgaaggaga ctaaggagaa gcgccaggaa |
| 721 | caaattgcga agagacgcag actttcctct ctgcgagctt ctacttctaa gtctgaatcc |
| 781 | agtcagaaat aagatttttt gagtaacaaa taaataagat cagactctg |

LOCUS NM_001011 745 bp mRNA linear PRI 18-JAN-2014
DEFINITION Homo sapiens ribosomal protein S7 (RPS7), mRNA. (SEQ ID NO: 700)

| | |
|---|---|
| 1 | gcgctgtttc cgcctcttgc cttcggacgc cggattttga cgtgctctcg cgagatttgg |
| 61 | gtctcttcct aagccggcgc tcggcaagtt ctcccaggag aaagccatgt tcagttcgag |
| 121 | cgccaagatc gtgaagccca atggcgagaa gccggacgag ttcgagtccg gcatctccca |
| 181 | ggctcttctg gagctggaga tgaactcgga cctcaaggct cagctcaggg agctgaatat |
| 241 | tacggcagct aaggaaattg aagttggtgg tggtcggaaa gctatcataa tctttgttcc |
| 301 | cgttcctcaa ctgaaatctt tccagaaaat ccaagtccgg ctagtacgcg aattggagaa |
| 361 | aaagttcagt gggaagcatg tcgtctttat cgctcagagg agaattctgc ctaagccaac |
| 421 | tcgaaaaagc cgtacaaaaa ataagcaaaa gcgtcccagg agccgtactc tgacagctgt |
| 481 | gcacgatgcc atccttgagg acttggtctt cccaagcgaa attgtgggca agagaatccg |
| 541 | cgtcaaacta gatggcagcc ggctcataaa ggttcatttg gacaaagcac agcagaacaa |
| 601 | tgtggaacac aaggttgaaa ctttttctgg tgtctataag aagctcacgg gcaaggatgt |
| 661 | taattttgaa ttcccagagt ttcaattgta aacaaaaatg actaaataaa aagtatatat |
| 721 | tcacagtaaa |

LOCUS NM_001012 705 bp mRNA linear PRI 17-APR-2013
DEFINITION Homo sapiens ribosomal protein S8 (RPS8), mRNA. (SEQ ID NO: 701)

| | |
|---|---|
| 1 | ctctttccag ccagcgccga gcgatgggca tctctcggga caactggcac aagcgccgca |
| 61 | aaaccggggg caagagaaag ccctaccaca agaagcggaa gtatgagttg gggcgcccag |
| 121 | ctgccaacac caagattagc ccccaccgca tccacacagt ccgtgtgcgg ggaagtaaca |
| 181 | agaaataccg tgccctgagg ttggacgtgg ggaatttctc ctggggctca gagtgttgta |
| 241 | ctcgtaaaac aaggatcatc gatgttgtct acaatgcatc taataacgag ctggttcgta |
| 301 | ccaagaccct ggtgaagaat tgcatcgtgc tcatcgacag cacaccgtac cgacagtggt |
| 361 | acgagtccca ctatgcgctg cccctgggcc gcaagaaggg agccaagctg actcctgagg |
| 421 | aagaagagat tttaaacaaa aaacgatcta aaaaaattca gaagaaatat gatgaaagaa |
| 481 | aaaagaatgc caaaatcagc agtctcctgg aggagcagtt ccagcagggc aagcttcttg |
| 541 | cgtgcatcgc ttcaaggccg ggacagtgtg gccgagcaga tggctatgtg ctagagggca |
| 601 | aagagttgga gttctatctt aggaaaatca aggcccgcaa aggcaaataa atccttgttt |
| 661 | tgtcttcacc catgtaataa aggtgtttat tgttttgttc ccaca |

LOCUS NM_001013 753 bp mRNA linear PRI 16-JUN-2013
DEFINITION Homo sapiens ribosomal protein S9 (RPS9), mRNA. (SEQ ID NO: 702)

| | |
|---|---|
| 1 | ctctttctca gtgaccgggt ggtttgctta ggcgcagacg gggaagcgga gccaacatgc |
| 61 | cagtggcccg gagctgggtt tgtcgcaaaa cttatgtgac cccgcggaga cccttcgaga |
| 121 | aatctcgtct cgaccaagag ctgaagctga tcggcgagta tgggctccgg aacaaacgtg |
| 181 | aggtctggag ggtcaaattt accctggcca agatccgcaa ggccgcccgg gaactgctga |
| 241 | cgcttgatga gaaggaccca cggcgtctgt tcgaaggcaa cgccctgctg cggcggctgg |
| 301 | tccgcattgg ggtgctggat gagggcaaga tgaagctgga ttacatcctg ggcctgaaga |
| 361 | tagaggattt cttagagaga cgcctgcaga cccaggtctt caagctgggc ttggccaagt |
| 421 | ccatccacca cgctcgcgtg ctgatccgcc agcgccatat cagggtccgc aagcaggtgg |
| 481 | tgaacatccc gtccttcatt gtccgcctgg attcccagaa gcacatcgac ttctctctgc |
| 541 | gctctcccta cgggggtggc cgcccgggcc gcgtgaagag gaagaatgcc aagaagggcc |
| 601 | agggtggggc tggggctgga gacgacgagg aggaggatta agtccacctg tccctcctgg |
| 661 | gctgctggat tgtctcgttt tcctgccaaa taaacaggat cagcgcttta caa |

LOCUS NM_001014 660 bp mRNA linear PRI 18-JAN-2014
DEFINITION Homo sapiens ribosomal protein S10 (RPS10), transcript variant 2,
mRNA. (SEQ ID NO: 703)

| | |
|---|---|
| 1 | ggcggggggc gggtccacgc cagcccggaa gagacgcagc accgcgcatg ctccttcctt |
| 61 | tccagccccg gtaccggacc ctgcagccgc agagatgttg atgcctaaga agaaccggat |
| 121 | tgccatttat gaactccttt ttaaggaggg agtcatggtg gccaagaagg atgtccacat |
| 181 | gcctaagcac ccggagctgg cagacaagaa tgtgcccaac cttcatgtca tgaaggccat |
| 241 | gcagtctctc aagtcccgag gctacgtgaa ggaacagttt gcctggagac atttctactg |
| 301 | gtaccttacc aatgagggta tccagtatct ccgtgattac cttcatctgc ccccggagat |
| 361 | tgtgcctgcc accctacgcc gtagccgtcc agagactggc aggcctcggc ctaaaggtct |
| 421 | ggagggtgag cgacctgcga gactcacaag aggggaagct gacagagata cctacagacg |
| 481 | gagtgctgtg ccacctggtg ccgacaagaa agccgaggct ggggctgggt cagcaaccga |
| 541 | attccagttt agaggcggat ttggtcgtgg acgtggtcag ccacctcagt aaaattggag |
| 601 | aggattcttt tgcattgaat aaacttacag ccaaaaaacc tta |

LOCUS NM_001015 646 bp mRNA linear PRI 07-JUL-2013
DEFINITION Homo sapiens ribosomal protein S11 (RPS11), mRNA. (SEQ ID NO: 704)

| | |
|---|---|
| 1 | tctccttacg tcacttcctc tccagcccct gcgtaatcga taaggaaacc cggacgctgc |
| 61 | tgcccctttc tttttttcag gcggccggga agatggcgga cattcagact gagcgtgcct |
| 121 | accaaaagca gccgaccatc tttcaaaaca agaagagggt cctgctggga gaaactggca |
| 181 | aggagaagct cccgcggtac tacaagaaca tcggtctggg cttcaagaca cccaaggagg |
| 241 | ctattgaggg cacctacatt gacaagaaat gccccttcac tggtaatgtg tccattcgag |
| 301 | ggcggatcct ctctggcgtg gtgaccaaga tgaagatgca gaggaccatt gtcatccgcc |
| 361 | gagactatct gcactacatc cgcaagtaca accgcttcga gaagcgccac aagaacatgt |
| 421 | ctgtacacct gtccccctgc ttcagggacg tccagatcgg tgacatcgtc acagtgggcg |
| 481 | agtgccggcc tctgagcaag acagtgcgct tcaacgtgct caaggtcacc aaggctgccg |
| 541 | gcaccaagaa gcagttccag aagttctgag gctggacatc ggcccgctcc ccacaatgaa |
| 601 | ataaagttat tttctcattc ccaggccaga cttgggatct tccgcg |

LOCUS NM_001016 532 bp mRNA linear PRI 03-NOV-2013
DEFINITION Homo sapiens ribosomal protein S12 (RPS12), mRNA. (SEQ ID NO: 705)

| | |
|---|---|
| 1 | ctctttccct gccgccgccg agtcgcgcgg aggcgaaggc ttgggtgcgt tcaagattca |
| 61 | acttcacccg taacccaccg ccatggccga ggaaggcatt gctgctggag gtgtaatgga |
| 121 | cgttaatact gctttacaag aggttctgaa gactgccctc atccacgatg gcctagcacg |
| 181 | tggaattcgc gaagctgcca aagccttaga caagcgccaa gcccatcttt gtgtgcttgc |
| 241 | atccaactgt gatgagccta tgtatgtcaa gttggtggag gccctttgtg ctgaacacca |
| 301 | aatcaaccta attaaggttg atgacaacaa gaaactagga gaatgggtag gcctttgtaa |
| 361 | aattgacaga gaggggaaac cccgtaaagt ggttggttgc agttgtgtag tagttaagga |
| 421 | ctatggcaag gagtctcagg ccaaggatgt cattgaagag tatttcaaat gcaagaaatg |
| 481 | aagaaataaa tctttggctc acaaa |

LOCUS NM_001017 529 bp mRNA linear PRI 10-JAN-2014
DEFINITION Homo sapiens ribosomal protein S13 (RPS13), mRNA. (SEQ ID NO: 706)

| | |
|---|---|
| 1 | cgctctcctt tcgttgcctg atcgccgcca tcatgggtcg catgcatgct cccgggaagg |
| 61 | gcctgtccca gtcggcttta ccctatcgac gcagcgtccc cacttggttg aagttgacat |
| 121 | ctgacgacgt gaaggagcag atttacaaac tggccaagaa gggccttact ccttcacaga |
| 181 | tcggtgtaat cctgagagat tcacatggtg ttgcacaagt acgttttgtg acaggcaata |
| 241 | aaattttaag aattcttaag tctaagggac ttgctcctga tcttcctgaa gatctctacc |
| 301 | atttaattaa gaaagcagtt gctgttcgaa agcatcttga gaggaacaga aaggataagg |
| 361 | atgctaaatt ccgtctgatt ctaatagaga gccggattca ccgtttggct cgatattata |
| 421 | agaccaagcg agtcctccct cccaattgga aatatgaatc atctacagcc tctgccctgg |
| 481 | tcgcataaat ttgtctgtgt actcaagcaa taaaatgatt gtttaacta |

LOCUS NM_005617 576 bp mRNA linear PRI 10-JAN-2014
DEFINITION Homo sapiens ribosomal protein S14 (RPS14), transcript variant 3,
mRNA. (SEQ ID NO: 707)

| | |
|---|---|
| 1 | ctccgccccc tcccactctc tctttccggt gtggagtctg gagacgacgt gcagaaatgg |
| 61 | cacctcgaaa ggggaaggaa aagaaggaag aacaggtcat cagcctcgga cctcaggtgg |
| 121 | ctgaaggaga gaatgtattt ggtgtctgcc atatctttgc atccttcaat gacacttttg |
| 181 | tccatgtcac tgatctttct ggcaaggaaa ccatctgccg tgtgactggt gggatgaagg |
| 241 | taaaggcaga ccgagatgaa tcctcaccat atgctgctat gttggctgcc caggatgtgg |
| 301 | cccagaggtg caaggagctg ggtatcaccg ccctacacat caaactccgg gccacaggag |
| 361 | gaaataggac caagacccct ggacctgggg cccagtcggc cctcagagcc cttgcccgct |
| 421 | cgggtatgaa gatcgggcgg attgaggatg tcacccccat cccctctgac agcactcgca |
| 481 | ggaagggggg tcgccgtggt cgccgtctgt gaacaagatt cctcaaaata ttttctgtta |
| 541 | ataaattgcc ttcatgtaaa ctgtttca |

LOCUS NM_001018 531 bp mRNA linear PRI 05-AUG-2013
DEFINITION Homo sapiens ribosomal protein S15 (RPS15), mRNA. (SEQ ID NO: 708)

| | |
|---|---|
| 1 | ggcagtctcg cgataactgc gcagacgcgg accaaagcga tctcttctga ggatccggca |
| 61 | agatggcaga agtagagcag aagaagaagc ggaccttccg caagttcacc taccgcggcg |
| 121 | tgaacctcga ccagctgctg gacatgtcct acgagcagct gatgcagctg tacagtgcgc |
| 181 | gccagcggcg gcggctgaac cggggcctgc ggcggaagca gcactccctg ctgaagcgcc |
| 241 | tgcgcaaggc caagaaggag gcgccgccca tggagaagcc ggaagtggtg aagacgcacc |
| 301 | tgcgggacat gatcatccta cccgagatag tgggcagcat ggtgggcgtc tacaacggca |
| 361 | agaccttcaa ccaggtgaag atcaagcccg agatgatcgg ccactacctg ggcgagttct |
| 421 | ccatcaccta caagcccgta aagcatggcc ggcccggcat cggggccacc cactcctccc |
| 481 | gcttcatccc tctcaagtaa tggctcagct aataaaggcg cacatgactc c |

LOCUS NM_001019 554 bp mRNA linear PRI 10-JAN-2014
DEFINITION Homo sapiens ribosomal protein S15a (RPS15A), transcript variant
2, mRNA. (SEQ ID NO: 709)

| | |
|---|---|
| 1 | ctctttccgc catctttccg cgccggtgag tagcactctc tgagagctcc aatttcatcc |
| 61 | gtctgccatc ggcgccatcc tgcaatctaa gccacaatgg tgcgcatgaa tgtcctggca |
| 121 | gatgctctca agagtatcaa caatgccgaa aagagaggca aacgccaggt gcttattagg |
| 181 | ccgtgctcca aagtcatcgt ccggtttctc actgtgatga tgaagcatgg ttacattggc |
| 241 | gaatttgaaa tcattgatga ccacagagct gggaaaattg ttgtgaacct cacaggcagg |
| 301 | ctaaacaagt gtggggtgat cagccccaga tttgacgtgc aactcaaaga cctggaaaaa |
| 361 | tggcagaata atctgcttcc atcccgccag tttggtttca ttgtactgac aacctcagct |
| 421 | ggcatcatgg accatgaaga agcaagacga aaacacacag gagggaaaat cctgggattc |
| 481 | tttttctagg gatgtaatac atatatttac aaataaaatg cctcatggac tctggtgctt |
| 541 | ccaa |

LOCUS NM_001020 603 bp mRNA linear PRI 26-JAN-2014
DEFINITION Homo sapiens ribosomal protein S16 (RPS16), mRNA. (SEQ ID NO: 710)

| | |
|---|---|
| 1 | gaaaagcggc cagggtggcc cctagctttc cttttccggt tgcggcgccg cgcggtgagg |
| 61 | ttgtctagtc cacgctcgga gccatgccgt ccaagggccc gctgcagtct gtgcaggtct |
| 121 | tcggacgcaa gaagacagcg acagctgtgg cgcactgcaa acgcggcaat ggtctcatca |
| 181 | aggtgaacgg gcggcccctg gagatgattg agccgcgcac gctacagtac aagctgctgg |
| 241 | agccagttct gcttctcggc aaggagcgat ttgctggtgt agacatccgt gtccgtgtaa |
| 301 | agggtggtgg tcacgtggcc cagatttatg ctatccgtca gtccatctcc aaagccctgg |
| 361 | tggcctatta ccagaaatat gtggatgagg cttccaagaa ggagatcaaa gacatcctca |
| 421 | tccagtatga ccggaccctg ctggtagctg accctcgtcg ctgcgagtcc aaaaagtttg |
| 481 | gaggccctgg tgcccgcgct cgctaccaga aatcctaccg ataagcccat cgtgactcaa |
| 541 | aactcacttg tataataaac agtttttgag ggattttaaa gtttcaagaa |

LOCUS NM_001021 511 bp mRNA linear PRI 18-JAN-2014
DEFINITION Homo sapiens ribosomal protein S17 (RPS17), mRNA. (SEQ ID NO: 711)

| | |
|---|---|
| 1 | gtttcctctt ttaccaagga cccgccaaca tgggccgcgt tcgcaccaaa accgtgaaga |
| 61 | aggcggcccg ggtcatcata gaaaagtact acacgcgcct gggcaacgac ttccacacga |
| 121 | acaagcgcgt gtgcgaggag atcgccatta tccccagcaa aaagctccgc aacaagatag |
| 181 | caggttatgt cacgcatctg atgaagcgaa ttcagagagg cccagtaaga ggtatctcca |
| 241 | tcaagctgca ggaggaggag agagaaagga gagacaatta tgttcctgag gtctcagcct |
| 301 | tggatcagga gattattgaa gtagatcctg acactaagga aatgctgaag cttttggact |
| 361 | tcggcagtct gtccaacctt caggtcactc agcctacagt tgggatgaat ttcaaaacgc |
| 421 | ctcggggacc tgtttgaatt ttttctgtag tgctgtatta ttttcaataa atctgggaca |
| 481 | acagcaaaaa |

LOCUS NM_022551 549 bp mRNA linear PRI 26-JAN-2014
DEFINITION Homo sapiens ribosomal protein S18 (RPS18), mRNA. (SEQ ID NO: 712)

| | |
|---|---|
| 1 | ctctcttcca caggaggcct acacgccgcc gcttgtgctg cagccatgtc tctagtgatc |
| 61 | cctgaaaagt tccagcatat tttgcgagta ctcaacacca acatcgatgg gcggcggaaa |
| 121 | atagcctttg ccatcactgc cattaagggt gtgggccgaa gatatgctca tgtggtgttg |
| 181 | aggaaagcag acattgacct caccaagagg gcgggagaac tcactgagga tgaggtggaa |
| 241 | cgtgtgatca ccattatgca gaatccacgc cagtacaaga tcccagactg gttcttgaac |
| 301 | agacagaagg atgtaaagga tggaaaatac agccaggtcc tagccaatgg tctggacaac |
| 361 | aagctccgtg aagacctgga gcgactgaag aagattcggg cccatagagg gctgcgtcac |
| 421 | ttctggggcc ttcgtgtccg aggccagcac accaagacca ctggccgccg tggccgcacc |
| 481 | gtgggtgtgt ccaagaagaa ataagtctgt aggccttgtc tgttaataaa tagtttatat |
| 541 | acaa |

LOCUS NM_018135 1207 bp mRNA linear PRI 10-JAN-2014
DEFINITION Homo sapiens mitochondrial ribosomal protein S18A (MRPS18A),
transcript variant 1, mRNA. (SEQ ID NO: 713)

| | |
|---|---|
| 1 | aaatggacga gaggtcaggg taggtttttg aagatggcgc ccctcaaggc tctggtgtcc |
| 61 | ggctgtgggc ggcttctCCg tgggctacta gcgggcccgg cagcgaccag ctggtctcgg |
| 121 | cttccagctc gcgggttcag ggaagtggtg gagacccaag aagggaagac aactataatt |
| 181 | gaaggccgta tcacagcgac tcccaaggag agtccaaatc ctcctaaccc ctctggccag |
| 241 | tgccccatct gccgttggaa cctgaagcac aagtataact atgacgatgt tctgctgctt |
| 301 | agccagttca tccggcctca tggaggcatg ctgccccgaa agatcacagg cctatgccag |
| 361 | gaagaacacc gcaagatcga ggagtgtgtg aagatggccc accgagcagg tctattacca |
| 421 | aatcacaggc ctcggcttcc tgaaggagtt gttccgaaga gcaaacccca actcaaccgg |
| 481 | tacctgacgc gctgggctcc tggctccgtc aagcccatct acaaaaaagg cccccgctgg |
| 541 | aacagggtgc gcatgcccgt ggggtcaccc cttctgaggg acaatgtctg ctactcaaga |
| 601 | acaccttgga agctgtatca ctgacagaga gcagtgcttc cagagttcct cctgcacctg |
| 661 | tgctggggag taggaggccc actcacaagc ccttggccac aactatactc ctgtcccacc |
| 721 | ccaccacgat ggcctggtcc ctccaacatg catggacagg ggacagtggg actaacttca |
| 781 | gtacccttgg cctgcacagt agcaatgctg ggagctagag gcaggcaggg cagttgggtc |
| 841 | ccttgccagc tgctatgggg cttaggccat gctcagtgct ggggacagga gttttgccca |
| 901 | acgcagtgtc ataaactggg ttcatgggct tacccattgg gtgtgcgctc actgcttggg |
| 961 | aagtgcaggg ggtcctgggc acattgccag ctgggtgctg agcattgagt cactgatctc |
| 1021 | ttgtgatggg gccaatgagt caattgaatt catgggccaa acaggtccca tcctcttcat |
| 1081 | gacagctgtg agctccttac tgtgggagag ctgcagggag ccaaggtggg ctgcctgaca |
| 1141 | cacttgccgc tctcgtgtga atccaagaaa ctgcgttcct caaaggggca |

LOCUS NM_001022 872 bp mRNA linear PRI 18-JAN-2014
DEFINITION Homo sapiens ribosomal protein S19 (RPS19), mRNA. (SEQ ID NO: 714)

| | |
|---|---|
| 1 | gtactttcgc catcatagta ttctccacca ctgttccttc cagccacgaa cgacgcaaac |
| 61 | gaagccaagt tcccccagct ccgaacagga gctctctatc ctctctctat tacactccgg |
| 121 | gagaaggaaa cgcgggagga aacccaggcc tccacgcgcg accccttggc cctccccttt |
| 181 | acctctccac ccctcactag acaccctccc ctctaggcgg ggacgaactt tcgccctgag |
| 241 | agaggcggag cctcagcgtc taccctcgct ctcgcgagct ttcggaactc tcgcgagacc |
| 301 | ctacgcccga cttgtgcgcc cgggaaaccc cgtcgttccc tttcccctgg ctggcagcgc |
| 361 | ggaggccgca cgatgcctgg agttactgta aaagacgtga accagcagga gttcgtcaga |
| 421 | gctctggcag ccttcctcaa aaagtccggg aagctgaaag tccccgaatg ggtggatacc |
| 481 | gtcaagctgg ccaagcacaa agagcttgct ccctacgatg agaactggtt ctacacgcga |
| 541 | gctgcttcca cagcgcggca cctgtacctc cggggtggcg ctggggttgg ctccatgacc |
| 601 | aagatctatg ggggacgtca gagaaacggc gtcatgccca gccacttcag ccgaggctcc |
| 661 | aagagtgtgg cccgccgggt cctccaagcc ctggaggggc tgaaaatggt ggaaaaggac |
| 721 | caagatggcg gccgcaaact gacacctcag ggacaaagag atctggacag aatcgccgga |
| 781 | caggtggcag ctgccaacaa gaagcattag aacaaaccat gctgggttaa taaattgcct |
| 841 | cattcgtaaa |

LOCUS NM_001023 857 bp mRNA linear PRI 11-JAN-2014
DEFINITION Homo sapiens ribosomal protein S20 (RPS20), transcript variant 2,
mRNA. (SEQ ID NO: 715)

| | |
|---|---|
| 1 | atatttcctg ttccggggcg tgtgggaccc ggatgcaagc gtgctatata agcgttgctc |
| 61 | aagtcccacc cctttctttt tgaggaagac gcggtcgtaa gggctgagga tttttggtcc |
| 121 | gcacgctcct gctcctgact caccgctgtt cgctctcgcc gaggaacaag tcggtcagga |
| 181 | agcccgcgcg caacagccat ggcttttaag gataccggaa aaacacccgt ggagccggag |
| 241 | gtggcaattc accgaattcg aatcacccta acaagccgca acgtaaaatc cttggaaaag |
| 301 | gtgtgtgctg acttgataag aggcgcaaaa gaaaagaatc tcaaagtgaa aggaccagtt |
| 361 | cgaatgccta ccaagacttt gagaatcact acaagaaaaa ctccttgtgg tgaaggttct |
| 421 | aagacgtggg atcgtttcca gatgagaatt cacaagcgac tcattgactt gcacagtcct |
| 481 | tctgagattg ttaagcagat tacttccatc agtattgagc caggagttga ggtggaagtc |
| 541 | accattgcag atgcttaagt caactatttt aataaattga tgaccagttg ttaacttctg |
| 601 | ttggttttta ttcagaatac tggcagattt taggaatata aaggtgtact atgagacttc |
| 661 | cacttttcag gtggaatata tgggtatctt agagtggtct atcctgtttt cgttgtcgtt |
| 721 | tgagtcattt gaaaactgga ttccgttaac tacataatat gtgagacctg actggtttta |
| 781 | ttggacactg gcagtttata actttggcat actctagata aattctgatt ggtatgggga |

LOCUS NM_001024 418 bp mRNA linear PRI 26-JAN-2014
DEFINITION Homo sapiens ribosomal protein S21 (RPS21), mRNA. (SEQ ID NO: 716)

| | |
|---|---|
| 1 | cttgcccgcc gatatctctg ccgggtgact agctgcttcc tttctctctc gcgcgcggtg |
| 61 | tggtggcagc aggcgcagcc cagcctcgaa atgcagaacg acgccggcga gttcgtggac |
| 121 | ctgtacgtgc cgcggaaatg ctccgctagc aatcgcatca tcggtgccaa ggaccacgca |
| 181 | tccatccaga tgaacgtggc cgaggttgac aaggtcacag gcaggtttaa tggccagttt |
| 241 | aaaacttatg ctatctgcgg ggccattcgt aggatgggtg agtcagatga ttccattctc |
| 301 | cgattggcca aggccgatgg catcgtctca aagaactttt gactggagag aatcacagat |
| 361 | gtggaatatt tgtcataaat aaataatgaa aacctaaaaa |

LOCUS NM_001025 3325 bp mRNA linear PRI 10-JAN-2014
DEFINITION Homo sapiens ribosomal protein S23 (RPS23), mRNA. (SEQ ID NO: 717)

| | |
|---|---|
| 1 | ggggtccttg gctgggcggg gcttgctcgc ggtggcttgt ggctccttcc tgcggtgctt |
| 61 | ctctctttcg ctcaggcccg tggcgccgac aggatgggca agtgtcgtgg acttcgtact |
| 121 | gctaggaagc tccgtagtca ccgacgagac cagaagtggc atgataaaca gtataagaaa |
| 181 | gctcatttgg gcacagccct aaaggccaac ccttttggag gtgcttctca tgcaaaagga |
| 241 | atcgtgctgg aaaaagtagg agttgaagcc aaacagccaa attctgccat taggaagtgt |
| 301 | gtaagggtcc agctgatcaa gaatggcaag aaaatcacag cctttgtacc caatgacggt |
| 361 | tgcttgaact ttattgagga aaatgatgaa gttctggttg ctggatttgg tcgcaaaggt |
| 421 | catgctgttg gtgatattcc tggagtccgc tttaaggttg tcaaagtagc caatgtttct |
| 481 | cttttggccc tatacaaagg caagaaggaa agaccaagat cataaatatt aatggtgaaa |
| 541 | acactgtagt aataaatttt catatgccaa aaaatgtttg tatcttactg tcccctgttc |
| 601 | tcaccacgaa gatcatgttc attaccacca ccaccccccc ttattttttt tatcctaaac |
| 661 | cagcaaacgc aggacctgta ccaattttag gagacaataa gacagggttg tttcaggatt |
| 721 | ctctagagtt aataacattt gtaacctggc acagtttccc tcatcctgtg gaataagaaa |
| 781 | atgggataga tctggaataa atgtgcagta ttgtagtatt actttaagaa ctttaaggga |
| 841 | acttcaaaaa ctcactgaaa ttctagtgag atactttctt ttttattctt ggtattttcc |
| 901 | atatcgggtg caacacttca gttaccaaat ttcattgcac atagattatc ttaggtaccc |
| 961 | ttggaaatgc acattcttgt atccatctta caggggccca agatgataaa tagtaaactc |
| 1021 | aaaattgctc cccactctgt ttattattta aaggtgtcag gatctgtgtt gtaatgtgtc |
| 1081 | tacattaatg tgtttaggag aatacaggca ttggatcatt tagttgatgg aagtatatgc |
| 1141 | caggcaaggg agataaggta tacgacaaga ctgatgtttt cagtatcttc tcatgaggtt |
| 1201 | gtcagagacc ttcatgtctt caaagactag tcagcaaatg aagtggttta gtgtagagac |
| 1261 | aagattggtt gtgttttgat aatttaagct aggtattgag tacatgtgga ttttgctgtc |
| 1321 | cacaaatact tgtttcagag ttttcatgga tacagtggca tggttgaaat gaagctgtga |
| 1381 | gccttctgct ttaaatctga tgtaagaaac tcctgttaac aaatagtaag tatgggttaa |
| 1441 | ttagcccttt gatcaaagcc tagctttaca ttgtttagga tctttggaaa acaattggtt |
| 1501 | tggttgccca ctttccgtag gatcaagagc agaacctttc acatggcaca gaagaaccca |
| 1561 | ggttgcgctt catacctgca tattccagcc ttagcctgcc atttctctcc ttggcacttt |
| 1621 | gtgctccagc aacactggtc tcagttggtc atcctcaaac ttgggttcca tatccagcct |
| 1681 | caggacctct gttcctgtta ctatggttcc ttgcatgtcg cctgctctta ctaaagagct |
| 1741 | cgtgtgtttt ccagcacact tcggtttatc tcttgatgat gatgctagtc tctccctccg |
| 1801 | caagggcgga aaggctgcct gttggtttgt accagtgttt cctaacgtgt agctgcagtc |
| 1861 | agtatttggc taagctgttc ccaggggctc aacagatgct ttcggatgag ccttaactga |
| 1921 | cccaatcctt tgtgatgcgg gagagattgc taggcctcgc tcacctggcc agaaccaggg |
| 1981 | aaagaggccg cggttgcagc gcgattccag gccctgggcg tcaggcgcgg ggtgggcagc |
| 2041 | tctccccggg cggtggggcc cttgtgaccg cgaggcgggg cgcaccagga agggagtggg |
| 2101 | acagcgcggg cgcccaggga tgtggcctgg ttacctgcct tctctgatac gtcaagacac |
| 2161 | cttcaacaat ggcttgcagc tgtaccctgt tggctgcacc caggacgccc ttttcactgc |
| 2221 | taagcagtcc tacctgaggc ccaggggctg ccagattgac ccataaataa tctccggcgc |
| 2281 | ctcagatcca gaagctgctg agcctgatct tagtgccttc tcctttctct gtgtggcccc |
| 2341 | ccagcccctt tccccactgc cttgtgtcca aggccctttc ctteatgtat ccatggagga |
| 2401 | gagacaaaaa tacacatcaa taaaataaga tagggaatcc ataaatagac attcagaagt |
| 2461 | atggccaacg gatttatctt aaaaccaatg gaggaagaag agtttcaata aatgttgtgg |
| 2521 | acttccattt gtcaaagacc aaaacaaagg aaccccaacc ttacatgtaa tacaaactta |
| 2581 | actcaaaatg gatcatatat ctaaatgtaa aatggaaagc tataaaactg aaaacagact |
| 2641 | atctttacaa cctaggcgta ggtatagttt ttagacatta caccaaaagc acatgccgta |
| 2701 | aaagaaaaaa tagataaatt ggtggatttc attaaaatta aaaaactttt tctctctgaa |
| 2761 | aaatcctgtt aagctgggcg ctgtggttca tgcctgtaat cccagcactt tgggaggctg |
| 2821 | agttgggaag aaattaatag cttgaggcca ggagttcaag atcatcctgg gcagcaaagt |
| 2881 | catacactct tgagggaaga gagagacctt ctcatattgt tttatattgt tttatactca |
| 2941 | gtacctgttt taagaaaaaa acaaggaagt gaaatcaaag acaggcagcc cggcaccagg |
| 3001 | cctgaaacca gccctgggcc tgcctggcct aaacctagta gttaaaaatc aacttacgac |
| 3061 | ttagaacctg atgttatccg tagattccaa gcattgtata aaaaaattgt gaaactccct |
| 3121 | gttgtgttct gtaccagtgc atgaaacccc tgtcacatat cccctagatt gctcaatcaa |
| 3181 | tcacgaccct ttcatgtgaa atctttagtg ttgtgagccc ttaaaaggga cagaaattgt |
| 3241 | gcacttgagg agctcagatt ttaaggctgt agcttgccga tgctcccagc tgaataaagc |
| 3301 | ccttccttct aca |

LOCUS NM_001026 649 bp mRNA linear PRI 18-JAN-2014
DEFINITION Homo sapiens ribosomal protein S24 (RPS24), transcript variant c,
mRNA. (SEQ ID NO: 718)

| | |
|---|---|
| 1 | aggcatcggc gcggtcagcc tcgtggcgcg cccacgcccc cacgccggct cttcccgggg |
| 61 | tccttccgtg cgcgttgata tgattggccg gcgaatcgtg gttctctttt cctccttggc |
| 121 | tgtctgaaga tagatcgcca tcatgaacga caccgtaact atccgcacta gaaagttcat |
| 181 | gaccaaccga ctacttcaga ggaaacaaat ggtcattgat gtccttcacc ccgggaaggc |
| 241 | gacagtgcct aagacagaaa ttcgggaaaa actagccaaa atgtacaaga ccacaccgga |
| 301 | tgtcatcttt gtatttggat tcagaactca ttttggtggt ggcaagacaa ctggctttgg |
| 361 | catgatttat gattccctgg attatgeaaa gaaaaatgaa cccaaacata gacttgcaag |
| 421 | acatggcctg tatgagaaga aaaagacctc aagaaagcaa cgaaaggaac gcaagaacag |
| 481 | aatgaagaaa gtcaggggga ctgcaaaggc caatgttggt gctggcaaaa agccgaagga |
| 541 | gtaaaggtgc tgcaatgatg ttagctgtgg ccactgtgga tttttcgcaa gaacattaat |
| 601 | aaactaaaaa cttcatgtgt ctggttgttt gaaa |

LOCUS NM_001028 514 bp mRNA linear PRI 10-JAN-2014
DEFINITION Homo sapiens ribosomal protein S25 (RFS25), mRNA. (SEQ ID NO: 719)

| | |
|---|---|
| 1 | cttccttttt gtccgacatc ttgacgaggc tgcggtgtct gctgctattc tccgagcttc |
| 61 | gcaatgccgc ctaaggacga caagaagaag aaggacgctg gaaagteggc caagaaagac |
| 121 | aaagacccag tgaacaaatc cgggggcaag gccaaaaaga agaagtggtc caaaggcaaa |
| 181 | gttcgggaca agctcaataa cttagtcttg tttgacaaag ctacctatga taaactctgt |
| 241 | aaggaagttc ccaactataa acttataacc ccagctgtgg tctctgagag actgaagatt |
| 301 | cgaggct.ccc tggccagggc agcccttcag gagctcctta gtaaaggact tatcaaactg |
| 361 | gtttcaaagc acagagctca agtaatttac accagaaata ccaagggtgg agatgctcca |
| 421 | gctgctggtg aagatgcatg aataggtcca accagctgta catttggaaa aataaaactt |
| 481 | tattaaatca |

LOCUS NM_001029 699 bp mRNA linear PRI 18-JAN-2014
DEFINITION Homo sapiens ribosomal protein S26 (RPS26), mRNA. (SEQ ID NO: 720)

| | |
|---|---|
| 1 | ggagacacat aacctcgatt ttcttccgcc atccggctaa atagtcccat gtgcactttg |
| 61 | ttccatggat aaataaacac taggaacgca tttccaccct agatttcagc agaaatgctg |
| 121 | aatgtaaagg aatatttgag taaagtgagt tgccgttctt gaagcccgtc tcctaaggat |
| 181 | tctcccggtg tccgcgtagg gatctcatgc tatataggag ggccctgcca ggcaccgtct |
| 241 | cctctctccg gtccgtgcct ccaagatgac aaagaaaaga aggaacaatg gtcgtgccaa |
| 301 | aaagggccgc ggccacgtgc agcctattcg ctgcactaac tgtgcccgat gcgtgcccaa |
| 361 | ggacaaggcc attaagaaat tcgtcattcg aaacatagtg gaggccgcag cagtcaggga |
| 421 | catttctgaa gcgagcgtct tcgatgccta tgtgcttccc aagctgtatg tgaagctaca |
| 481 | ttactgtgtg agttgtgcaa ttcacagcaa agtagtcagg aatcgatctc gtgaagcccg |
| 541 | caaggaccga acacccccac cccgatttag acctgcgggt gctgccccac gtcccccacc |
| 601 | aaagcccatg taaggagctg agttcttaaa gactgaagac aggctattct ctggagaaaa |
| 661 | ataaaatgga aattgtactt |

LOCUS NM_001030 361 bp mRNA linear PRI 17-APR-2013
DEFINITION Homo sapiens ribosomal protein S27 (RPS27), mRNA. (SEQ ID NO: 721)

| | |
|---|---|
| 1 | ctttccggcg gtgacgacct acgcacacga gaacatgect ctcgcaaagg atctccttca |
| 61 | tccctctcca gaagaggaga agaggaaaca caagaagaaa cgcctggtgc agagccccaa |
| 121 | ttcctacttc atggatgtga aatgcccagg atgctataaa atcaccacgg tctttagcca |
| 181 | tgcacaaacg gtagttttgt gtgttggctg ctccactgtc ctctgccagc ctacaggagg |
| 241 | aaaagcaagg cttacagaag gatgttcctt caggaggaag cagcactaaa agcactctga |
| 301 | gtcaagatga gtgggaaacc atctcaataa acacattttg gataaatcct ga |

LOCUS NM_002954 1068 bp mRNA linear PRI 09-JAN-2014
DEFINITION Homo sapiens ribosomal protein S27a (RPS27A), transcript variant
1, mRNA. (SEQ ID NO: 722)

| | |
|---|---|
| 1 | ctcgacctcc ttttaaaaat tctcttagcc acgttgattg tacgggaaaa gcctttttaa |
| 61 | aacatctttt acgttgctta aacctacagt ttcgaaagca ttccgaaggc taaagtgaga |
| 121 | aataagccca ggctagggag aggagaaacg aagttcacgt cctagtctgg caccgggttg |
| 181 | gattgtcgct gggacggcag tcaggcattt ggtgtggtcg cctaaggggt gggtccttcg |
| 241 | gcgggagctc cgggaaaccc cgtgggcctg cgcggcgttc ttccttttcg atccgccatc |
| 301 | tgcggtggag ccgccaccaa aatgcagatt ttcgtgaaaa cccttacggg gaagaccatc |
| 361 | accctcgagg ttgaaccctc ggatacgata gaaaatgtaa aggccaagat ccaggataag |
| 421 | gaaggaattc ctcctgatca gcagagactg atctttgctg gcaagcagct ggaagatgga |
| 481 | cgtactttgt ctgactacaa tattcaaaag gagtctactc ttcatcttgt gttgagactt |
| 541 | cgtggtggtg ctaagaaaag gaagaagaag tcttacacca ctcccaagaa gaataagcac |
| 601 | aagagaaaga aggttaagct ggctgtcctg aaatattata aggtggatga gaatggcaaa |
| 661 | attagtcgcc ttcgtegaga gtgcccttct gatgaatgtg gtgctggggt gtttatggca |
| 721 | agtcactttg acagacatta ttgtggcaaa tgttgtctga cttactgttt caacaaacca |
| 781 | gaagacaagt aactgtatga gttaataaaa gacatgaact aacatttatt gttgggtttt |
| 841 | attgcagtaa aaagaatggt ttttaagcac caaattgatg gtcacaccat ttccttttag |
| 901 | tagtgctact gctatcgctg tgtgaatgtt gcctctgggg attatgtgac ccagtggttc |
| 961 | tgtatacctg ccaggtgcca accacttgta aaggtcttga tattttcaat tcttagacta |
| 1021 | cctatacttt ggcagaagtt atatttaatg taagttgtct aaatataa |

LOCUS NM_001031 401 bp mRNA linear PRI 17-APR-2013
DEFINITION Homo sapiens ribosomal protein S28 (RFS28), mRNA. (SEQ ID NO: 723)

| | |
|---|---|
| 1 | ctctccgcca gaccgccgcc gcgccgccat catggacacc agccgtgtgc agcctatcaa |
| 61 | gctggccagg gtcaccaagg tcctgggcag gaccggttct cagggacagt gcacgcaggt |
| 121 | gcgcgtggaa ttcatggacg acacgagccg atccatcatc cgcaatgtaa aaggccccgt |
| 181 | gcgcgagggc gacgtgctca cccttttgga gtcagagcga gaagcccgga ggttgcgctg |
| 241 | agcttggctg ctcgctgggt cttggatgtc gggttcgacc acttggccga tgggaatggt |
| 301 | ctgtcacagt ctgctccttt tttttgtccg ccacacgtaa ctgagatgct cctttaaata |
| 361 | aagcgtttgt gtttcaagtt aa |

LOCUS NM_001032 386 bp mRNA linear PRI 11-JAN-2014
DEFINITION Homo sapiens ribosomal protein S29 (RPS29), transcript variant 1,
mRNA. (SEQ ID NO: 724)

| | |
|---|---|
| 1 | ctcaaaaatt tgaagagcgc atgcgtgggc cagcttcttc cttttacctc gttgcactgc |
| 61 | tgagagcaag atgggtcacc agcagctgta ctggagccac ccgcgaaaat tcggccaggg |
| 121 | ttctcgctct tgtcgtgtct gttcaaaccg gcacggtctg atccggaaat atggcctcaa |
| 181 | tatgtgccgc cagtgtttcc gtcagtacgc gaaggatatc ggtttcatta agttggacta |
| 241 | aatgctcttc cttcagagga ttatccgggg catctactca atgaaaaacc atgataattc |
| 301 | tttgtatata aaataaacat ttgaaaaaac ccttcaaaaa |

APPENDIX 8
DNA ribosomal protein mRNA Capture Probes

| Name | Sequence |
|---|---|
| MRPL20_NM_017971_r1_1 | /5Biosg/GAGCTGCGCGGTGAGGAAGACCATGGCGCCTGCAGGCCGGCGTCCCGAACACTCAA |
| (SEQ ID NO: 725) | CAACGCACGCGCAGCGCCGCTGCCATCTTGCCCGGGTCGGAAATGGTGGTCACGAGCGCTTCCG |
| MRPL20_NM_017971_r1_2 | /5Biosg/CCGCCAACCTGTAGCAGCGATTTTTCCTTCCCCGGAAGTGCCTGGCGTGCTTCAGC |
| (SEQ ID NO: 726) | ACCTCCTGGATCCGAAAGTAGCGGTCGGTGACGCGATTCCGCAGCCAGAGCTGCGCGGTGAGGA |
| MRPL20_NM_017971_r1_3 | /5Biosg/CTGGCTAGCAGCTGTAATTCGATTAATCCAGAGGGTCCTCATGTTCTTTTTCTTCA |
| (SEQ ID NO: 727) | GGTATCGGGCTTTGGTGCATTTCACAAAGGCTCGAATCACGGTTCTGACCGCCAACCTGTAGCA |
| MRPL20_NM_017971_r1_4 | /5Biosg/TCTTTGGCTCGTAGATGGCCAGATCCGCTAGGACTTTCCTGTTGAGCTCCACCTGG |
| (SEQ ID NO: 728) | CACTTAACTAAATTCCCAATGAGCGCTGGATACTTCAGTCCATGTTCCTGGCTAGCAGCTGTAA |
| MRPL20_NM_017971_r1_5 | /5Biosg/ACCACTCTGGAAAAAATGCCTTCAGGTTCCTTCCCATCCCCCAAGGCAGCAGCAAA |
| (SEQ ID NO: 729) | TCCTTCGTGTCGCCTCCTACTGGCCAAGGCAGCCAAAGATTTGAAAGTCTTTGGCTCGTAGATG |
| MRPL20_NM_017971_r1_6 | /5Biosg/GTCTGTTATTGGGTTGTAGATAAACAAAAGTATAAATCAAACAAACTGCAAATTAC |
| (SEQ ID NO: 730) | TCTGTCTCTTTTCCTAATCAATACAGCAACAGTCCTCAGTGGTACTGCACCACTCTGGAAAAAA |
| MRPL20_NM_017971_r1_7 | /5Biosg/TTTTTTTTGACTCTAAAAACTGAAGAGTGTTTGAGTTTCATTCACACAAAACATGG |
| (SEQ ID NO: 731) | ACATCATCTGTGAGGCTCTGTCCCAGAGAGACAGGGCCATCCCTCATGTCTGTTATTGGGTTGT |
| MRPL41_NM_032477_r1_1 | /5Biosg/GGACCGGAGACCCCACACGAGCTCCAAGCGGCCCCGGCTCCGGCGCCAACCCGGCC |
| (SEQ ID NO: 732) | TCGACCTTGCTCCGCTTCCGACCGCTGCGTCGCAGCAAGAGCGGCTCCGATTGGCCGCGGCCGC |
| MRPL41_NM_032477_r1_2 | /5Biosg/GCTGCGCGGGCCCCGCTTGCTCGTCCACTTGCTCATTCGGTCCGCACCCCGGACCA |
| (SEQ ID NO: 733) | GGCAGCGCGCCGCTGCGGCCAGGACGCCCATGCCGCGCCCTGGACCGGAGACCCCACACGAGCT |
| MRPL41_NM_032477_r1_3 | /5Biosg/CGACGAACTCCGGGACCATCTCCTTGATCTGCACGAACCTCCAGCCCGAGGTGAGG |
| (SEQ ID NO: 734) | AAGCCGATGCCCTTGGCGCCCCGGCCCTTGCGGCCCCTGAAGCTGCGCGGGCCCCGCTTGCTCG |
| MRPL41_NM_032477_r1_4 | /5Biosg/TTCGCTGAAGAGCTGCGCGGCCGTCAGGGGCGTCTCCTCGCTCTCAGGGGCGAGGT |
| (SEQ ID NO: 735) | AGCTCACGTAGGGCTTGAGCTTGAAGCCGGTCAGATCCGGGACGACGAACTCCGGGACCATCTC |
| MRPL41_NM_032477_r1_5 | /5Biosg/GCTTTCCCTCCTGTGTGGGCTCGAAGCCGTACTTTTCCAGGTTGTCAGGGTCGAAG |
| (SEQ ID NO: 736) | GTACCGTCCTTGAAGTCCTTTTCGATGGCAGGCGCCACGGCTTCGCTGAAGAGCTGCGCGGCCG |
| MRPL41_NM_032477_r1_6 | /5Biosg/TTTAGCTGGCAAAGGCGTTTAATAGAAATGAGATGAGGGCAGGCCGCCCCTCCCCC |
| (SEQ ID NO: 737) | GCCCAGCTAGCGCAGGAAGTTCCTGGGGTAGAGCTGGAACAGCTTTCCCTCCTGTGTGGGCTCG |
| MRPS18A_NM_018135_r1_1 | /5Biosg/CCGAGACCAGCTGGTCGCTGCCGGGCCCGCTAGTAGCCCACGGAGAAGCCGCCCAC |
| (SEQ ID NO: 738) | AGCCGGACACCAGAGCCTTGAGGGCCGCCATCTTCAAAAACCTACCCTGACCTCTCGTCCATTT |
| MRPS18A_NM_018135_r1_2 | /5Biosg/TGGCCAGAGGGGTTAGGAGGATTTGGACTCTCCTTGGGAGTCGCTGTGATACGGCC |
| (SEQ ID NO: 739) | TTCAATTATAGTTGTCTTCCCTTCTTGGGTCTCCACCACTTCCCTGAACCCGCGAGCTGGAAGC |
| MRPS18A_NM_018135_r1_3 | /5Biosg/GGCATAGGCCTGTGATCTTTCGGGGCAGCATGCCTCCATGAGGCCGGATGAACTGG |
| (SEQ ID NO: 740) | CTAAGCAGCAGAACATCGTCATAGTTATACTTGTGCTTCAGGTTCCAACGGCAGATGGGGCACT |
| MRPS18A_NM_018135_r1_4 | /5Biosg/GTTGAGTTGGGGTTTGCTCTTCGGAACAACTCCTTCAGGAAGCCGAGGCCTGTGAT |
| (SEQ ID NO: 741) | TTGGTAATAGACCTGCTCGGTGGGCCATCTTCACACACTCCTCGATCTTGCGGTGTTCTTCCTG |
| MRPS18A_NM_018135_r1_5 | /5Biosg/GAGTAGCAGACATTGTCCCTCAGAAGGGGTGACCCCACGGGCATGCGCACCCTGTT |
| (SEQ ID NO: 742) | CCAGCGGGGGCCTTTTTTGTAGATGGGCTTGACGGAGCCAGGAGCCCAGCGCGTCAGGTACCGG |
| MRPS18A_NM_018135_r1_6 | /5Biosg/ACAGGAGTATAGTTGTGGCCAAGGGCTTGTGAGTGGGCCTCCTACTCCCCAGCACA |
| (SEQ ID NO: 743) | GGTGCAGGAGGAACTCTGGAAGCACTGCTCTCTGTCAGTGATACAGCTTCCAAGGTGTTCTTGA |
| MRPS18A_NM_018135_r1_7 | /5Biosg/CTGCCCTGCCTGCCTCTAGCTCCCAGCATTGCTACTGTGCAGGCCAAGGGTACTGA |
| (SEQ ID NO: 744) | AGTTAGTCCCACTGTCCCCTGTCCATGCATGTTGGAGGGACCAGGCCATCGTGGTGGGGTGGGA |
| MRPS18A_NM_018135_r1_8 | /5Biosg/GTGAGCGCACACCCAATGGGTAAGCCCATGAACCCAGTTTATGACACTGCGTTGGG |
| (SEQ ID NO: 745) | CAAAACTCCTGTCCCCAGCACTGAGCATGGCCTAAGCCCCATAGCAGCTGGCAAGGGACCCAAC |
| MRPS18A_NM_018135_r1_9 | /5Biosg/ATGGGACCTGTTTGGCCCATGAATTCAATTGACTCATTGGCCCCATCACAAGAGAT |
| (SEQ ID NO: 746) | CAGTGACTCAATGCTCAGCACCCAGCTGGCAATGTGCCCAGGACCCCCTGCACTTCCCAAGCAG |
| MRPS18A_NM_018135_r1_10 | /5Biosg/TGCCCCTTTGAGGAACGCAGTTTCTTGGATTCACACGAGAGCGGCAAGTGTGTCAG |
| (SEQ ID NO: 747) | GCAGCCCACCTTGGCTCCCTGCAGCTCTCCCACAGTAAGGAGCTCACAGCTGTCATGAAGAGGA |
| RPS27A_NM_002954_r1_1 | /5Biosg/TCTCACTTTAGCCTTCGGAATGCTTTCGAAACTGTAGGTTTAAGCAACGTAAAAGA |
| (SEQ ID NO: 748) | TGTTTTAAAAAGGCTTTTCCCGTACAATCAACGTGGCTAAGAGAATTTTTAAAAGGAGGTCGAG |
| RPS27A_NM_002954_r1_2 | /5Biosg/GAAGGACCCACCCCTTAGGCGACCACACCAAATGCCTGACTGCCGTCCCAGCGACA |
| (SEQ ID NO: 749) | ATCCAACCCGGTGCCAGACTAGGACGTGAACTTCGTTTCTCCTCTCCCTAGCCTGGGCTTATTT |
| RPS27A_NM_002954_r1_3 | /5Biosg/GGTCTTCCCCGTAAGGGTTTTCACGAAAATCTGCATTTTGGTGGCGGCTCCACCGC |
| (SEQ ID NO: 750) | AGATGGCGGATCGAAAAGGAAGAACGCCGCGCAGGCCCACGGGGTTTCCCGGAGCTCCCGCCGA |
| RPS27A_NM_002954_r1_4 | /5Biosg/CTTCCAGCTGCTTGCCAGCAAAGATCAGTCTCTGCTGATCAGGAGGAATTCCTTCC |
| (SEQ ID NO: 751) | TTATCCTGGATCTTGGCCTTTACATTTTCTATCGTATCCGAGGGTTCAACCTCGAGGGTGATGG |
| RPS27A_NM_002954_r1_5 | /5Biosg/ATTCTTCTTGGGAGTGGTGTAAGACTTCTTCTTCCTTTTCTTAGCACCACCACGAA |
| (SEQ ID NO: 752) | GTCTCAACACAAGATGAAGAGTAGACTCCTTTTGAATATTGTAGTCAGACAAAGTACGTCCATC |
| RPS27A_NM_002954_r1_6 | /5Biosg/AACACCCCAGCACCACATTCATCAGAAGGGCACTCTCGACGAAGGCGACTAATTTT |
| (SEQ ID NO: 753) | GCCATTCTCATCCACCTTATAATATTTCAGGACAGCCAGCTTAACCTTCTTTCTCTTGTGCTTA |
| RPS27A_NM_002954_r1_7 | /5Biosg/CAATAAATGTTAGTTCATGTCTTTTATTAACTCATACAGTTACTTGTCTTCTGGTT |
| (SEQ ID NO: 754) | TGTTGAAACAGTAAGTCAGACAACATTTGCCACAATAATGTCTGTCAAAGTGACTTGCCATAAA |
| RPS27A_NM_002954_r1_8 | /5Biosg/TCACATAATCCCCAGAGGCAACATTCACACAGCGATAGCAGTAGCACTACTAAAAG |
| (SEQ ID NO: 755) | GAAATGGTGTGACCATCAATTTGGTGCTTAAAAACCATTCTTTTTACTGCAATAAAACCCAACA |
| RPS27A_NM_002954_r1_9 | /5Biosg/TTATATTTAGACAACTTACATTAAATATAACTTCTGCCAAAGTATAGGTAGTCTAA |
| (SEQ ID NO: 756) | GAATTGAAAATATCAAGACCTTTACAAGTGGTTGGCACCTGGCAGGTATACAGAACCACTGGGT |
| RPL10A_NM_007104_r1_1 | /5Biosg/AGGAACTTGCGGCGCTTGCGCTGGTTCCCGTGCAGGACTTCCCGCACCGCCTCGTA |
| (SEQ ID NO: 757) | CAGGGTGTCGCGAGAGACTTTGCTGCTCATGGCTTCTCACGCCGCGCTAACCGGAAAAGAGACT |
| RPL10A_NM_007104_r1_2 | /5Biosg/CCCAGGACACACACAGAGAACTTAGGGCGGGGAGTGGACTTAAGCCTGACGGTGCC |
| (SEQ ID NO: 758) | CGAGAAGCGCTTGTCCTTCTGGGGATCATAGTTCTTCAAGCTGATCTGCAACTCCACCGTCTCC |
| RPL10A_NM_007104_r1_3 | /5Biosg/GCATCATACTTCTTGGCCAGCTTCTTGACCAGTTTTTTATTCTTGTTGAGTTTTTT |
| (SEQ ID NO: 759) | CAGCGCCTCGATGTCCATGTGGGGGATATCCACGGCCTTAGCCTCGTCACAGTGCTGCTGGTCC |
| RPL10A_NM_007104_r1_4 | /5Biosg/CCACTTTGGCCACCATGTTTTCGTTGTGTGTGAGCAGGGAAGGGAACTTTCCTGCC |
| (SEQ ID NO: 760) | TTATTTAAACCTGGGCCGAGGATTCGTGGAATCTGCTTGATCAGAGACTCTGAGGCCAAAAACG |
| RPL10A_NM_007104_r1_5 | /5Biosg/AGTTGACAGCCAGGTGAATGTTATACACAAGCTCATCGTCTGTCATCTTCACGTGA |
| (SEQ ID NO: 761) | CCAACAGCTACAGCCAGACATAACACCTTCTTCATTTGGAACTTGATTGTGGACTTCACCTCAT |
| RPL10A_NM_007104_r1_6 | /5Biosg/GAACTGGTAATAGAATTTATTCAAATGTGCCTTAATATAGGCGCTGGGGCTTGCCC |
| (SEQ ID NO: 762) | ATGGTGCTCTTGATATATAAGGCCCGGACATTCTGCCAGTTTTTCTTGAGCAATGACACCAAGA |
| RPL10_NM_006013_r1_1 | /5Biosg/ATAGGCGGTCTGTCTGCGCGCGTAAGAACCATAGAGTCCTGTCGAAGACGGGTGGA |
| (SEQ ID NO: 763) | CGCTCTGTCAGACGTCATGACCATAGACGCAGCCGCTCTTGGCGCTTGCGCCCGGGCGTAGCCC |
| RPL10_NM_006013_r1_2 | /5Biosg/CGGCTTGTTCTTACAATACCGGTAACAACGGGCGGGGCGGCGGCCCATGGCGACAC |
| (SEQ ID NO: 764) | CAGGATCTTCAGTGGCACACCGAAGGGAAAGAGGCGCTCCTCCGCCTGCGCATGGCTTATATAG |
| RPL10_NM_006013_r1_3 | /5Biosg/TCTGACACCATGTGGCCACAAAGCGGAAACTCATCCACTTTTGCCTTTTTCCGCCC |
| (SEQ ID NO: 765) | CAGGTCAAAAATGCGAATCTTGGCATCAGGGACACCTCGGCAGAAGCGAGACTTTGGGTACGGC |
| RPL10_NM_006013_r1_4 | /5Biosg/GGGGTGGAGCCGCACCCGGATATGGAAGCCATCTTTGCCACAACTTTTTACCATGT |
| (SEQ ID NO: 766) | ACTTATTGGCACAAATTCGGGCAGCCTCCAGGGCTTCAGAGGACAGCTGCTCATATTCATCTGA |
| RPL10_NM_006013_r1_5 | /5Biosg/CCAATGTGAACCCTGGCCACAGTGCCCTGGGGCTTTCCAAAGGCACCTCGCATGCC |
| (SEQ ID NO: 767) | TGTTTGGAGCCTGTCAGCCCCAGCACAGGACAACATCTTGTTGATGCGGATGACGTGGAAGGGG |
| RPL10_NM_006013_r1_6 | /5Biosg/ACTTCTTTGAGATGTGGATCTTCTGGCGGCCAGGAAACTTGAACTTGGCCCTGCGC |
| (SEQ ID NO: 768) | AGGGCCTCAATCACATGCTCCTTGTTCTGCAGCTTGGTGCGGATGGACATGATAACTTGGCCAA |
| RPL10_NM_006013_r1_7 | /5Biosg/CCACTTGTCCAGAGGGCCACGATTGGGGATGTACTTGACCCCACAGCCATCTGGGA |
| (SEQ ID NO: 769) | TGAGCCGCTTTTCAGCCACCATGTCTTCAAATTCATCAGCATTGAACTTGGTGAAGCCCCACTT |
| RPL10_NM_006013_r1_8 | /5Biosg/GTTCCTTCCCCGTCAAGAATGTAGATACAAAGACATAGGTGGACAGGAAGTAGAAT |
| (SEQ ID NO: 770) | TTATTGGTGAGTATTAAGAGGGGGGCAGCACATTGGAAGCCCTCATGAGTGCAGGGCCCGCCAC |
| RPL10_NM_006013_r1_9 | /5Biosg/TGACATAAGGCCACCAGTCCCAGCCCTTTGCAGGGTTTGCTGCCTCATGAGCAGGG |
| (SEQ ID NO: 771) | CTGAGTTGTCAACCTGTTTCTGAAGTGAAAGGGCAATGACCCAAAGGTTCCCAGAGGAAGTTCC |
| RPL10_NM_006013_r1_10 | /5Biosg/CCAGCCTGGGATTGCAAGGCTTTGCTGCAGCTGTGCTTCATGAAAAGCACTTCAGT |
| (SEQ ID NO: 772) | GTTTTTCAACCTACTGCCTAGGACCTGGGGAGGTCCAAGTCAAGCTCCAGAGTAGACAACTGAC |
| RPL10_NM_006013_r1_11 | /5Biosg/AGCCCAATGTGATGCACACCTACCCTTGCTAAATAAACGCTGCTGGTCAGCCTCTA |
| (SEQ ID NO: 773) | GCCCACAAGCCCCTCTTGGTCCGCATGTGTTGTAATAAGCAACACAACTGTAGGCTGACCCCAG |
| RPL10_NM_006013_r1_12 | /5Biosg/GGCATGGGGCCCAGGAGGTTGCTAGAGATAGGAAATGGGGCAAATCGCAGGTGACC |
| (SEQ ID NO: 774) | TCAGCAGTACCTGGATGATTCCCACCAAGGAGGAATGGCCAAACCAGATGGGTGAGAACAAGCC |
| RPL10_NM_006013_r1_13 | /5Biosg/AAACCATGCCACACACGTGTCTGTTCCGAGGTCTTGTTACAAATGACCAAAGGTTA |
| (SEQ ID NO: 775) | GCCTAGACCTTTGGTCAGGTGGTGAAGGCCCTGGGAATGCAGGTTCTAGAAGGGGTGGGGGCAT |
| RPL10_NM_006013_r1_14 | /5Biosg/TCCCTGGATACAGATGCTCAGGCCACCCACCTAGCACTCCTCTCATTTTTGCTGCT |
| (SEQ ID NO: 776) | CCCCCAAAAGCCAGCGCTGTTCTACAATAGTTCAGGTCAGACATCTAAGATCCCCAGGCCAAAC |
| RPL10_NM_006013_r1_15 | /5Biosg/CCTAAGAAATGGCTGTAAACTGAGATTACAAAAAACCAGAGGCCTTTTGGGAGCCA |
| (SEQ ID NO: 777) | CAGGCTGGGGGCTGGGGCCAACATACCCCAGCTCTGGGACCAAAAGCCTTTGGAGTCCTGTCCC |
| RPL10_NM_006013_r1_16 | /5Biosg/GGGTCATGTGTTAACTATAATCACATTTATGGTTTGGAACCATCACCCCAAGGTAA |
| (SEQ ID NO: 778) | AAAAAAAATAAAAGGTATTCCCAGGTATGTTTGGCAAAATAAAATAAAGGTAATTAAAAACCTA |
| RPL10_NM_006013_r1_17 | /5Biosg/GTCCCGGAAAGGGGCTGCAGGACACAGCAAAATGCCAGCAGCGTGCCGGACCCCTC |
| (SEQ ID NO: 779) | CCTTCCATCCTCCTCTCCAAAGAACAGAGGTCAGGAAAAACACTGGCTGGGACGCTAGAAGGGT |
| RPL10_NM_006013_r1_18 | /5Biosg/GTTGGTACAGGCTTCTGCATGCCTGGTAAAGTCCAGCCAAGGCTGGTCAAGGCAAC |
| (SEQ ID NO: 780) | ATCTCCACACAGAAAATCTGCACCAGTTATGTAAGCTAAAAAGCTGTGTGAACCCAGGTGTCCC |
| RPL10_NM_006013_r1_19 | /5Biosg/GAAACCAGCAAACACCGGGAAACATTTTGGCTCATTATAATCCGGTGAACAATGCA |
| (SEQ ID NO: 781) | GTCAGGCCTGTTATAACCGCTGAGCAGCCACACTCGCACCTCCTGGGTGCTGTAGTCTGTGTTG |
| RPL10_NM_006013_r1_20 | /5Biosg/TTGCAGATATGCCAATGGGCCATGTTTATTGTGGATTGGTAAGAATCACCAGGAAA |
| (SEQ ID NO: 782) | CCATTAAGCCCCAATAGCTACAAGGAGGGTGGTTAATCTGCTATATCAAACTCCTTCCCTGAAA |
| RPL11_NM_000575_r1_1 | /5Biosg/ACAGATGTTGAGACAGAGTTTGCGGATGCGAAGTTCCCGCATGGGGTTCTCCTTTT |
| (SEQ ID NO: 783) | CACCTTGATCCTGCGCCATGATGGAGAGCAGGAAGAGAAAGCGGAGCTTCCGGCCGAGGGCCTT |
| RPL11_NM_000975_r1_2 | /5Biosg/AGGATCTGACAGTGTATCTAGCTTTGGAAAACACAGGGGTCTGCCCTGTGAGCTGC |
| (SEQ ID NO: 784) | TCCAACACCTTGGCTGCTCGCGTCAGTCTGTCTCCACTCTCCCCAACACAGATGTTGAGACAGA |
| RPL11_NM_000975_r1_3 | /5Biosg/TAACTCATACTCCCGCACCTTTAGACCCTTCTCCAAGATTTCTTCTGCCTTGGCCC |
| (SEQ ID NO: 785) | CTCGAACTGTGCAGTGGACAGCAATCTTTTCATTTCTCCGGATGCCAAAGGATCTGACAGTGTA |
| RPL11_NM_000975_r1_4 | /5Biosg/CCAGGCCGTAGATACCAATGCTTGGGTCATATTTGATACCCAGATCGATGTGTTCC |
| (SEQ ID NO: 786) | TGGATCCCAAAACCAAAGTTTCCAGTATCTGAGAAGTTGTTTTTTCTTAACTCATACTCCCGCA |
| RPL11_NM_000975_r1_5 | /5Biosg/CATGGCCTCCTCTTTGCTGATTCTGTGTTTGGCCCCAATGCAGCCTGTCCTGCGCT |
| (SEQ ID NO: 787) | TCTTGTCTGCGATGCTGAAACCTGGCCTACCCAGCACCACATAGAAGTCCAGGCCGTAGATACC |
| RPL11_NM_000975_r1_6 | /5Biosg/TTTTTGCACATTTCACTGAAAACTTTTTATTGCTCTTTTGGATAGAAACGGGAATT |
| (SEQ ID NO: 788) | TATTTGCCAGGAAGGATGATCCCATCATACTTCTGCTGGAACCAGCGCATGGCCTCCTCTTTGC |
| RPL12_NM_000976_r1_1 | /5Biosg/GGCATGGTGGAGGCGGCTGGTGTCGGATGAACCCGGATTCGGGACGACCGAAGGAA |
| (SEQ ID NO: 789) | GTTGCACCTTGGCCTCCTCCGAGCCGAAAGCCGAGAGGCCGGAAATCGCGCGGACAAGCCAGAT |
| RPL12_NM_000976_r1_2 | /5Biosg/GACAGACCCAGGGGGCCGATCTTGGGGGCCAGGGCAGAAGTGGCACCGACTTCACC |
| (SEQ ID NO: 790) | TCCGGTGCACCTCAGGTATACGACTTTGATCTCGTTGGGGTCGAACTTCGGCGGCATGGTGGAG |
| RPL12_NM_000976_r1_3 | /5Biosg/ACCACCTCAATCTGGGCCTGTCTGTTCTGAATGGTCAGTTTCACTGTAATCCTCAG |
| (SEQ ID NO: 791) | GCCCTTCCAGTCACCCGTTGCCTTGGCAATGTCATCACCAACTTTTTTTGGAGACAGACCCAGG |
| RPL12_NM_000976_r1_4 | /5Biosg/ACAATCTCATCAAAAGTGATATTCCCACTGTGTTTAATGTTTTTCTGTTTCTTTCT |
| (SEQ ID NO: 792) | GTCTCTTGGTGGTTCCTTGAGGGCTTTGATGATCAGGGCAGAGGCAGAAGGCACCACCTCAATC |
| RPL12_NM_000976_r1_5 | /5Biosg/CGGCCATCAACATTACAGCCCACTGACTGGGCAGTCCCCAGGATCTCTTTAATGGT |
| (SEQ ID NO: 793) | TCCAGAGAGTTCTCTGGCTAAGGATCGGTGCCGCATCTGTCGAGCAATGTTGACAATCTCATCA |
| RPL12_NM_000976_r1_6 | /5Biosg/TCCACCAGTTGTCAAATGATCCTTTATTGAAATGTTTTCCTTTGTGCTTAACTGGC |
| (SEQ ID NO: 794) | TGGGCATTCCACAGCACCACTGTTGATGTCATCGATGATGTCATGAGGATGGCGGCCATCAACA |
| RPL13A_NM_012423_r1_1 | /5Biosg/AGATGGCCTCGACCATCAAGCACCAGGACCTGCACCTCCGCCATCTTCGGCAGCCG |
| (SEQ ID NO: 795) | CTTGGAAAAGGAGGAGGTTTTGTCGCAGGGTTTCTTATCCCTTGAAACAGGGGCGGCAGAAGTG |
| RPL13A_NM_012423_r1_2 | /5Biosg/GTACTTCAACTTGTTTCTGTAGAAATTGCCAGAAATGTTGATGCCTTCACAGCGTA |
| (SEQ ID NO: 796) | CGACCACCACCTTCCGGCCCAGCAGTACCTGTTTAGCCACGATGGCCGCCAGGCGGCCCAGGAG |
| RPL13A_NM_012423_r1_3 | /5Biosg/GCTTGGTTTTGTGGGGCAGCATACCTCGCACGGTCCGCCAGAAGATGCGGCTGGGG |
| (SEQ ID NO: 797) | GCCCGGAAGTGGTAGGGGCCTCGGGAAGGGTTGGTGTTCATCCGCTTGCGGAGGAAAGCCAGGT |
| RPL13A_NM_012423_r1_4 | /5Biosg/TTGTAGGCTTCAGACGCACGACCTTGAGGGCAGCAGGAACCACCATCCGCTTTTTC |
| (SEQ ID NO: 798) | TTGTCGTAGGGCGGTGGGATGCCGTCAAACACCTTGAGACGGTCCAGAGCGGCCTGGCCTCGCT |
| RPL13A_NM_012423_r1_5 | /5Biosg/TTCTTCTTCCGGTAGTGGATCTTGGCTTTCTCTTTCCTCTTCTCCTCCAGGGTGGC |
| (SEQ ID NO: 799) | TGTCACTGCCTGGTACTTCCAGCCAACCTCGTGAGCCAGGCGCCCCAGATAGGCAAACTTTCTT |
| RPL13A_NM_012423_r1_6 | /5Biosg/AATTAACAGTCTTTATTGGGCTCAGACCAGGAGTCCGTGGGTCTTGAGGACCTCTG |
| (SEQ ID NO: 800) | TGTATTTGTCAATTTTCTTCTCCACGTTCTTCTCGGCCTGTTTCCGTAGCCTCATGAGCTGTTT |
| RPL13A_NM_012423_r1_7 | /5Biosg/CTTTCCTTGCTCCCAGCTTCCTATGTCCCAGGGCTGCCTGTGGCACCTGGACTGCT |
| (SEQ ID NO: 801) | GCTGCCCCTGGGTCCCGTACATTCCAGGGCAACAATGGAGGAAGGGCAGGCAACGCATGAGGAA |
| RPL13A_NM_012423_r1_8 | /5Biosg/TTCTGGCTCCCTTTCACTCATAGTAACTGGTTGCTCTTCCTATTGGTCATAGATAA |
| (SEQ ID NO: 802) | ATGACACCTGCACAATTCTCCGAGTGCTTTCAAGCAACTTCGGGAGGCAGTGACTAAGACCCTT |
| RPL13A_NM_012423_r1_9 | /5Biosg/ACAACAGCAAGCTCATGCTGTCCCCAAGTGCTTGCACATTCTAACAGCTGCAGAGT |
| (SEQ ID NO: 803) | ATATGACCAGGTGGAAAGTCCAACAGATGCCCCACTCACAAGATAGGGCCCTCCAATCAGTCTT |
| RPL13A_NM_012423_r1_10 | /5Biosg/TTCTTTAAAAGCAATTTATTTCTGATTACAAAATACAGGTGAGGAGCATGGGCGAT |
| (SEQ ID NO: 804) | GCCTGTAACCCCTTGGTTGTGCATCTTCCCAGTCTATTTCTGCTTCTAGAAATACCCTGTGTAC |
| RPL13_NM_033251_r1_1 | /5Biosg/GGGCAGCGGCCGAACGCTGTCTGCGAAGAAGAAGGGGCCCATCCACTCCCGCGTTG |
| (SEQ ID NO: 805) | GCTGAAGCGCCAGGCCGATGGCGCTGGATGATGCCCAAAGGCCAGGACCCAGTCTCCCTCACCT |
| RPL13_NM_033251_r1_2 | /5Biosg/CGGCCCTGCGGCTGCGGACGAGAGGGGAGCGAGTGAGAGGCCGGACCCCGGGCGCG |
| (SEQ ID NO: 806) | CGCACCCCCCCGGGCCTCCGCCCCGAACCCTCCAGACTGGGCCGTCCGGCCGCGCCTAGAGCCC |
| RPL13_NM_033251_r1_3 | /5Biosg/CTTACGTCTGCGGATCTTACGGGCCGGCTGGTTGAACCACGTGGCCACGCGCCGCT |
| (SEQ ID NO: 807) | GCCAGTCCTTGTGGAAGTGGGGCTTCAAGACCATGCCATTCCGGCTGGGCGCCATGGCTGCCTA |
| RPL13_NM_033251_r1_4 | /5Biosg/CTGAAGCCGCGGCCGGCGCGCACCTTCGTGTGGTACCGAACCGTGGGGCAGCGCAC |
| (SEQ ID NO: 808) | GATGGGCCGGATGGGACCCGACGCGGGGCGCGGGGCGATGCGGCGCGCCTTGGCTTGCCGGGCC |
| RPL13_NM_033251_r1_5 | /5Biosg/AGCCGCTGCACGTTGGCCTGCAGGGACTCCGTGGACTTGTTCCGCCTCCTCGGATC |
| (SEQ ID NO: 809) | CACAGAAATGCCGATGGTCCGGGCCACCTTCTTGTGAATGCCGGCCACCCTGAGCTCCTCCAGG |
| RPL13_NM_033251_r1_6 | /5Biosg/ACGGGCATGACCGGTCCGGTCAGCTGGGTGGCCAGTTTCAGTTCTTCAGCAGAACT |
| (SEQ ID NO: 810) | GTCTCCCTTCTTGGGGGCCGAGGGCTTCCTGGGGAAGAGGATGAGTTTGGAGCGGTACTCCTTC |
| RPL13_NM_033251_r1_7 | /5Biosg/TTTGCCCGTATGCCGAAGAGCCGGGCGTTGGCACGGGCCATACGGAGACTAGCGAA |
| (SEQ ID NO: 811) | GGCTTTGAAATTCTTCTCTTCCTCAGTGATGACTCGAGCTTTCTCCTTCTTATAGACGTTCCGG |
| RPL13_NM_033251_r1_8 | /5Biosg/CAGTTGTTCCCACGAAACACACCACGTGGAGACCCAGCATGACTGCCGACTGATTC |
| (SEQ ID NO: 812) | CAAGTCCCCAGGAGGGCTTTATTTTTTCTTTTCAACATCCTGTTCTGCGGCTTCCTTGGCTCTT |
| RPL13_NM_033251_r1_9 | /5Biosg/CAACCAACAGTGCTTCAACACAGAAAGTAAAGCATTATCCAGGGCTTGGACTGTCT |
| (SEQ ID NO: 813) | TTCAAGAAAGCCCCAAATCCCCTGGCAGGAGGAAGTCACAGCAGTGAAGCCCCATCCCAGGCCC |
| RPL13_NM_033251_r1_10 | /5Biosg/TACAGCTGTGAGCACCAGCCCAACCTTGCCTCTTTAAAAAGAAAAAACACAAGTCC |
| (SEQ ID NO: 814) | ACTCTGAAGTCAGCCTCTGTAACCTCCCCACAAGAAAACCGTTTTACATCAGTCACTAACCAAA |
| RPL13_NM_033251_r1_11 | /5Biosg/CCCAGGAGCTGCAACTACAAGTGTGCAGCACCAAGCATGGCTGATTTCTTTATTTT |
| (SEQ ID NO: 815) | TAGTAGTTCTGACATGTTGGCCAGGCTGGTCTTGAACTCCCAGCCAACCTCAAAGTGCTGGGAT |
| RPL13_NM_033251_r1_12 | /5Biosg/CCCTGTCTCTTTTTTTTTTTTTGAGACAGTCTCACTGTTGCCCAGGCTAGAGTGCA |
| (SEQ ID NO: 816) | GTGGCGTGATCCTGGCTCAGTGCAGCCTCTGCCTCCTGGGTTAAGTGATCCCTCACCTCTGCCT |
| RPL13_NM_033251_r1_13 | /5Biosg/GGTCTCGTGCCTATAAACCCCTCTACTTGGGAGGCTGAGGGAGGACTGCTTGAGGC |
| (SEQ ID NO: 817) | CATGAGTTCAAGACTGCAGTGAGCCATGATTGTGGCACTGTACTCCAGCCTGGGTGCCGAAGAC |
| RPL13_NM_033251_r1_14 | /5Biosg/AGAGCAAGAGGACCATGGTTACCGGGCACAACAAGCTTAAGAATGACGCCCCAAAG |
| (SEQ ID NO: 818) | TCCAAGATGCTACATTAACTAGAAACTGCTTTGCTTAAAAAAGGCAACTCTAGGTTGGGTGCAG |
| RPL13_NM_033251_r1_15 | /5Biosg/CCATGAAGCAAGAACAATGGCTTTAGAATGTTTTTGTTTAACAGGAGAGGCCGACA |
| (SEQ ID NO: 819) | CTTGGCAGGGCCATCTCATACCTTGGTGTCTGGGTGAAGAAGCCCATTGAAGGAAGGGTTAATC |
| RPL13_NM_033251_r1_16 | /5Biosg/GGACTAGGGCAGGCTGTGTCTGAGCACTGCACGAGAAACCATGCTGCCCTCGGACA |
| (SEQ ID NO: 820) | CAGAAGACATGGGGATGCCAGCTCAGACCAGGGCACCCTGGCACTCTCTCTGGCTGCCTCTTGT |
| RPL13_NM_033251_r1_17 | /5Biosg/TACCGGCACCCGGCAGAGGCATGTAGACAAAACAGAATCTGACTCGGTCCCTGAAG |
| (SEQ ID NO: 821) | CTGCTTCTCTGGGGTTGTCATGGCCATAGCTGCCAAGGAGAGCAGGTGCTGCTGTGAGCTGGTA |
| RPL13_NM_033251_r1_18 | /5Biosg/GTTTAGATGTTTCCAAACAAGCAAGGTGTCATCGTGTATCAAGTGTGGCTGTGAGT |
| (SEQ ID NO: 822) | GCAGCAGCAGAGGTAGCAGCATCACCTATTTCCACGCCAGTAACAGCTCCCTGGGTGCCTCAAT |
| RPL13_NM_033251_r1_19 | /5Biosg/CCGGCCCACCTTAACTTTACATAGGACAAGAGTCCCAAACATACAAACTGATCACG |
| (SEQ ID NO: 823) | AAGTTAACATATACACCTCAGACAGGAAACTGGTAGCCAACAGCCTGCAAGTCATCTACTAGAT |
| RPL13_NM_033251_r1_20 | /5Biosg/ACAGGCGTGTGTCACCACTCAGCTAATTTTTGTATTTTCAGTAGAGATGAGGTTTC |
| (SEQ ID NO: 824) | ACCATCAGGTGATCCACCCGCCTCGGCCTCCCAGTGTTAGGATTACAGGCGTGAGCCACTGCAC |
| RPL13_NM_033251_r1_21 | /5Biosg/ACCTTGTACAACTTTTTTTGAGACTGAGTCTCGCTGTCACCCAGGCTGGAGCACAG |
| (SEQ ID NO: 825) | TGGTGCAGCTCGGCTCACTGCAATCTCTGCCTCCTGGGTTCAAGCCTACCAAGTAGCTGGGATT |
| RPL13_NM_033251_r1_22 | /5Biosg/AGCGCTGGAGACCCCTGCACCCCCCACGGCCAGTCTTCAGCCAGGTTGGAATCCAC |
| (SEQ ID NO: 826) | CAGAAATCTTCAGGCCCTCTCACGTGAGAGGGATTCGAGCCTAGGCTCAAGCTTCCAACCATCC |
| RPL13_NM_033251_r1_23 | /5Biosg/CCTCTGCTCCATTCACGTCACCACATGGCATTACCTACTCCAGGTGCGGCCCCGCA |
| (SEQ ID NO: 827) | GGCAGCAGGAAAGGCCCTTCCCCTAGTGCGGTGTGGGCAGGGAGGAAGCAGGCTGGAGGGCAGA |
| RPL13_NM_033251_r1_24 | /5Biosg/AGATGATACCTGAACCCTGACTTCCCGTCAAGTCGGCTGGTAGGAGGGCCCCCGGA |
| (SEQ ID NO: 828) | ACACGCAGATCAGAGTGCTTTTGTCCCACAGTAAAAACAGCAAGGCGGTGTGATGGGGCACAGA |
| RPL13_NM_033251_r1_25 | /5Biosg/TAGATTAAGCAAACGGAGAGAACGTAAGGTTAGCAACACAGCCCTGGAGACTGTGA |
| (SEQ ID NO: 829) | CTTTCAGTGAAATGAGGAGGGGACTCTGGCAGGTTCAGTGCAGACTACCCCGCCCCAGGTGCAC |
| RPL13_NM_033251_r1_26 | /5Biosg/CTCACCAAACTCACAATGTCCCAGCGCAACCTAGAAAAATGACCTCTTGCTAAGAG |
| (SEQ ID NO: 830) | CACCGGCCAACAGCAGGGCCCCAGACAACAGAGAAAGCCCATCCTCTCCTGTTAGGGCTCTTAA |
| RPL13_NM_033251_r1_27 | /5Biosg/GCAGAAGCCTTCCTCAGCCCCAGGAAGGGCAGAGCCGCACTAGCTGCATTTCAGGT |
| (SEQ ID NO: 831) | AGGGGAGCAGCAGGCAGCAGGCAGCCCGGCCCAGCCCAGCCCAGCCCAGCCCACATCCATGACC |
| RPL13_NM_033251_r1_28 | /5Biosg/AGAGTCTTTCTTGGAGCAGACAGGCCCGTACCTGGATCAGGAGATCTTGCTCCAGC |
| (SEQ ID NO: 832) | TACAAGGACTGAGTGTCAGCAGGGAGGCTGCCTCACCCACCTGCCCAGCCCCCCAGCTATCCTG |
| RPL13_NM_033251_r1_29 | /5Biosg/GGGCACGGCCCACACTCAGGCACTTGTCCCCACCAGCGGGGTATCCTGGGCCGACA |
| (SEQ ID NO: 833) | GGTGCTGAATCAGGCGGTCCCCAGGGACTAAGTTAAAACAAAGGGCCCCTTTGCATCTGGTGGC |
| RPL13_NM_033251_r1_30 | /5Biosg/CCTGGCACAGAGGGCTGGTTCCAGCCCGGGTTCCACAGCGCCCCCTAGGTCAGGCC |
| (SEQ ID NO: 834) | CACACATCACAACTGAAAAGCCACTTCCTAGTCAGGACGGCCCCACTCAGGGATGGCCACACTC |
| RPL13_NM0333251_r1_31 | /5Biosg/ACGAAATCAAGGTGTTCCCAGAGCCGCTTTGCCTGAGGTGCGGTGGGGGCCCTTCC |
| (SEQ ID NO: 835) | TCTCAGCTCCCAGTGACCCACGCCATGGCAGCTGCCCCTCAGGGCCGGCGGAACCTGTCTGCGG |
| RPL13_NM_033251_r1_32 | /5Biosg/TGAGGAGCCTGGGCGCACCTGCACTTCCTCCACCGGGCAGCAGACCACAAGCTCGT |
| (SEQ ID NO: 836) | GGCACACAGGTCAGTTTCTCAGGCTTCACAGCTTGGCTGCCCTCCCTGGGACGGCTCACATGGA |
| RPL13_NM_033251_r1_33 | /5Biosg/TGCCGTAAAACCAACGCTTCTACAAAAGGCCACGGGCACCACAGAGCCAGCCCGTG |
| (SEQ ID NO: 837) | CTCCCCGGGGGCGACAGGCTGAATAGGAAATGCTCACACCCCGAAGGAATCCTGCAAAACGGAA |
| RPL13_NM_033251_r1_34 | /5Biosg/GCCTCCTGAGACTATCCCCGATCAGTTCTGCAGGCGCCGGAGCGCGCCTGGCCCCA |
| (SEQ ID NO: 838) | TGACCCCCGTGGGCACTGCTGGCAAAGCCCCACCCACTGTGGGAGGCTGCCCCAGAGATGAACC |
| RPL13_NM_033251_r1_35 | /5Biosg/GTGAGAAACGGTGCATCACCGAGGCAGGCGACTCGTGCCTCCTGAGACTATCCCCG |
| (SEQ ID NO: 839) | ATCACCGGGGCAGGAGACTAGCGCCTTCTGAGACTATCCCCGATCACCGGGGCACGTGACTAGC |
| RPL13_NM_033251_r1_36 | /5Biosg/AACTGAAATTCCTAATGTCTAGCCAAAAGAAAAAGCAAAATAAACAATACATGGAG |
| (SEQ ID NO: 840) | GAAAATTGTGTGCAGCTCCTATCCGCACACGTCTTCCCCTTTAGCTCGGGCGAGAGCAGCCGGT |
| RPL13_NM_033251_r1_37 | /5Biosg/TGGGCTCATGCCATCCTCCCCCCTCAGCCTCCCAAAGTTTTGAGACTATAGGCGTG |
| (SEQ ID NO: 841) | AGCGACCTCACCCAGCCCTGCATGATAATTTTAAAATAGAAAAGGAAAAATACAACTTGGGAAA |
| RPL13_NM_033251_r1_38 | /5Biosg/TCCAGGGTCGAAACTACTGCATAATAGTTTTGTTTTTTTTTTTCCTGAGATAGGGT |
| (SEQ ID NO: 842) | CTCGCTCTGTCATGCAGGCTGGAGGACAGTGGAGCGATCTCGGCTCACTGCAGCCTTAAACTCC |
| RPL13_NM_033251_r1_39 | /5Biosg/AAATGATTGGCAATTACATATATTTTTAACAAAGCAACTACAGGATAACCAGATTC |
| (SEQ ID NO: 843) | CAAATGAAACTACGCCTGGATGGGCGAGGTACACGTGTTACAACTCAAAGATGCACACTCGTCT |
| NM_003973_RPL14_r1_1 | /5Biosg/AAAGGAGACATAGGCCACCCGGCCAACCTCCACGAAGCGCCTGAACACCATGTTGG |
| (SEQ ID NO: 844) | CGGCGTTAGGCGAGAAGGAAGAAGACCCGCCCAACCCTGCGCATGTGTAGAAGAACGCACCGCC |
| NM_003973_RPL14_r1_2 | /5Biosg/TGAAAGGCATGGCCTGTCTCCTCACTTGAGTGCAAGGTCCATCGACCAAAGCCCTG |
| (SEQ ID NO: 845) | TTCTGATCAATAACATCTACAATCGCGACCAATTTTCCGGCATGAGGTCCAAAGGAGACATAGG |
| NM_003973_RPL14_r1_3 | /5Biosg/CTGCCCATTTTGTATTGATGTCTGCCTTCTGCCAGGCTTGTCGGACATACTTCTGG |
| (SEQ ID NO: 846) | TGGGCACTGTGCGGAAACTTGAGGATGAAATCAGTGAGCTGCATGCACTTGAAAGGCATGGCCT |
| NM_003973_RPL14_r1_4 | /5Biosg/ATTATTCTGTTCCTCATTTTCTTTGCCTTCATAACTTTAAAACGATCAAAATCTGT |
| (SEQ ID NO: 847) | CATCTTGGCTTTCCTTTCTCTGGCTTCAATCTTCTTGGCCCATCGTGTGGCTGCCCATTTTGTA |
| NM_003973_RPL14_r1_5 | /5Biosg/AGCAGCAGCAGCAGCAGCAGCAGCAGCAGTACCCTTAGTACCAGGTGCTTTTTTGG |
| (SEQ ID NO: 848) | GAGAAGCTTTCAGGAGAGCTGCCTTTTGAAGCTTCTTAACTTCATTCTTGATTATTCTGTTCCT |
| NM_003973_RPL14_r1_6 | /5Biosg/CTTTTGGAGCAGGCGCTGCTTTCTGGCCTGTGGCTTTCTGGGCAGGAACCTTCTGG |
| (SEQ ID NO: 849) | GCTGGAGCCTTTTTACTCGCGGCGGTGATCTTTTTTGCTGGAACTTTAGCAGCAGCAGCAGCAG |
| NM_003973_RPL14_r1_7 | /5Biosg/GTCAAAAAGAACCTTTATTACTTTTTATGATTGCCACTTATGCTTTCTTGCCAGAT |
| (SEQ ID NO: 850) | GCCTTTGGAGCAGGTGCTTTCTGGGCTGGAGCTTTTTGACCCTTCTGAGCTTTTGGAGCAGGCG |
| NM_003973_RPL14_r1_8 | /5Biosg/TTTGAACTGATTATTTAATGTTTATTATAATCCTACTATCAATCTGCCTCCTAACT |
| (SEQ ID NO: 851) | CCAGCCTCAACAGGCTTTAAATCCAAAGGCTTAAATACATTTGTCAACAGGTCAAAAAGAACCT |
| RPL15_NM_002948_r1_1 | /5Biosg/TTGGCGGCGAGGTCTCGGCGGCTAAGCGAGCGTCGGCGACTGTCTCTCCGCGAGAG |
| (SEQ ID NO: 852) | GAGGCAAGTTGGGGTCCAGGCTCCAAAGCCGGTGGCCGCGTACCGCGGTGGAGCCGCTGTCTTT |
| RPL15_NM_002948_r1_2 | /5Biosg/GGCATCGCGCCTGGTGGCGGAGTTCTGCCGAGTGGGGCGCCGCGGCCGCTATTGTC |
| (SEQ ID NO: 853) | CCGCCCCCTGCTCCGCAAGATTCGAGCCTGAGCGGCCTGGGCGTCTCGAGAGGTGAGAGAGTTG |
| RPL15_NM_002948_r1_3 | /5Biosg/AGACGGAAAGGAAAGAGCTGTACTCCCACAATGCCTTTTGGGCTCCTCCCCCACCT |
| (SEQ ID NO: 854) | CAGCCACCCTCTTTCCGGTGGAAAGCTGCGGCCTCCCAGAGCGTCATGGGACATGTAGTTCCGG |
| RPL15_NM_002948_r1_4 | /5Biosg/CGGTACTGCCAGCAGCGGACCCTCAGAAGAAAGCGCATGACATCAGACTGCTTCTT |
| (SEQ ID NO: 855) | TCTCCATAGCTCCTGGATGTACTTGTATGCACCCATCTTGGCTTACCTGATGGCTGCCGCCAGA |
| RPL15_NM_002948_r1_5 | /5Biosg/CCACCACGGCGAACACGAATCCTATATATAACGTAACCTTGCTTGGCCTTGTAGCC |
| (SEQ ID NO: 856) | CAGTCGGGGCGCTTTATCAGGCCGGGTGGGGCGGGGAGCCCTGTGGAGAGCAGAGAGCTGGCGG |
| RPL15_NM_002948_r1_6 | /5Biosg/GTGGCGTCCAGCTCGCTCCTCTGCAACGGACTGAAGGCTTCGAGCAAACTTTAGCT |
| (SEQ ID NO: 857) | GGTTAACACCATGATGGACAGGCTTGCCGTAAGTTGCACCCTTAGGAACTGGGCGTTTTCGGCC |
| RPL15_NM_002948_r1_7 | /5Biosg/GGTGTCAGGATTTCTTCTGATAGCTTTATGGAATGGATCAATGAGGATAACCTCAA |
| (SEQ ID NO: 858) | AAAATTTGTATGTGGAATCTTCACCAACCCAGTAAGAATTCAGGACTCTCAGAGCCCCACAGTG |
| RPL15_NM_002948_r1_8 | /5Biosg/GAGAGCCACCAATAGTGTGGTGGAACTTGTGGCCCTTTCCAAGGCCACGGCTCTTT |
| (SEQ ID NO: 859) | CGGCCTGCAGATGTCAGCCCACGCATCTCCCTGTGCTTGTGGACTGGTTTGGTGATCCACTGGG |
| RPL15_NM_002948_r1_9 | /5Biosg/CTGTAAGCAGACATGACTGTCCTAAATTGTTTATTAAGTATGAATTTTACAAACTT |
| (SEQ ID NO: 860) | TACTTATATTAGCGGTAACGGTGGAGCTGGAGAGTATTGCGCCTTCTCCAAGCTGCCCGGCGAG |
| RPL15_NM_002948_r1_10 | /5Biosg/TTAGAAACAAGATACACCACCACTTATTGTCTTCAAACATTATTGCACTTTAACTT |
| (SEQ ID NO: 861) | TCTTAATTTGACAAAGCATTCAAGAAACATCTGCAGACTAGTTTTAACAGACAAATAACACCTG |
| RPL15_NM_002948_r1_11 | /5Biosg/TAGTTTCAGTTCTCTCCTTTTAAAGAATTTATTAAGCCTGTTATACCACACAGTAT |
| (SEQ ID NO: 862) | GTTTTATACACTGACATACAACTCCCTAATAAGATAAAGCAAAGACAAAAAAGTTTATCTTATT |
| RPL15_NM_002948_r1_12 | /5Biosg/GTCTACACCTGCCAAACTAAAAAAAACGCAGCCACTTGAAAATAAACCAGCAGAGC |
| (SEQ ID NO: 863) | ATTGCCATCACTCCGATAAAGCTGCAGGTTTCATCACATGCACCAGACAAATCTACAGGGCTAG |
| RPL15_NM_002948_r1_13 | /5Biosg/GAAGCCATGGCACTGAACCAGGAGCTTTCACCTTTTATGTGAATTTAAAATGGTAC |
| (SEQ ID NO: 864) | TGTGGAGGCTGAGGCAATTTTCTTCAGGCTAACCCAGATTTTCTAAAGCCCAACTTAAAAAGTC |
| RPL15_NM_002948_r1_14 | /5Biosg/CAGCTTCCCACCCTAGCATTCATTGCTAGCTTACCAATCTTAAGGCTAATAATTTT |
| (SEQ ID NO: 865) | ATCGCACATTCAACTTCAAAACACACCAGTGTTTACCATTACCACTAATCACTGAATGCCATGA |
| RPL15_NM_002948_r1_15 | /5Biosg/CCCCTAATGTGACTGAAGGGATTCATAATGATCACAATTAGCATTACGGTTAAGTA |
| (SEQ ID NO: 866) | TTTTAGGGTTGACGTCTAAGCTCACACTTGAAAGGTATTTATCTAATGGCCACTGGCTCACCAG |
| RPL15_NM_002948_r1_16 | /5Biosg/TGGAAACCATGCGCTTGTGACTTTTTCTGTAGCCTATGGGAGTGGACAGAGTGGGT |
| (SEQ ID NO: 867) | AACCCAAGATGTTTTTAAGACTGACTGGACTAAGAATGACGTACTTATAGCCAACTACTTTCCC |
| RPL15_NM_002948_r1_17 | /5Biosg/TGGTATACTCATAGTCAAAGTGGGTGCACAAGTGATGGTCCAACTTTGTGGAATGG |
| (SEQ ID NO: 868) | TAAGGATTTTTAGGGTTGTTTGGCCAGAACAAGAGAAATAACTGCAGAAAACACATATGGTTGG |
| RPL15_NM_002948_r1_18 | /5Biosg/AGTCAGAATTTAAAATTGGGCAATTCCTTGTCTACATTTTCTTTACACTCAAATTG |
| (SEQ ID NO: 869) | ACCCTGGACAACAGTAGTCTAGTCTCCTGGAAGACATGGTGCAAACAGAAATGCAATGTGGTGG |
| RPL15_NM_002948_r1_19 | /5Biosg/GAACTTTTATGAACTTGCTATGAGTACTTCCTGGAAATCAATTAACTGAGTCTTTT |
| (SEQ ID NO: 870) | GAAACCCCTAGAGAAGATAGGAGAAAATTGGTTCAGAACGAGCATTTAAATTAAGTCAGCAAAG |
| RPL15_NM_002948_r1_20 | /5Biosg/GAAGGTCCATTTGTTTTAGTTTAATAGACATTTATTCCTTCAGTTGAACAACCTCT |
| (SEQ ID NO: 871) | ACACAATTAAAATGTATGACATAAGATCTTTTCTTTTTTTGTGAAGAAATTTAGGTCTCAAGAA |
| RPL17_NM_000985_r1_1 | /5Biosg/ATCCAGTCAACCCTCAGGCTGCTTAGGGAAAGAGGAAGAGCGGTGGATTTTGGGAG |
| (SEQ ID NO: 872) | AACTCATGAGAACTTGACTTCTCGCGAGATTCGTAGCCGAAGAAACGAGATCTGAGGAGGCAGG |
| RPL17_NM_000985_r1_2 | /5Biosg/GGTGTCCTAAGAAATGCCATCATCGCAGCCATACTTTCCCCCACCAAGGGCTTGCT |
| (SEQ ID NO: 873) | TTCCCTTTTATCTTCCAGTAACTACAGCACTGCTTCCACAGAAGTAGCCACACGGGCCTCACCA |
| RPL17_NM_000985_r1_3 | /5Biosg/CACCTAGAGGAAAGTACAGTGTAATTCTGTCAATACGTACTTACAGTAACTCATTC |
| (SEQ ID NO: 874) | AGTATAAATATCAGATGATTCGAACAGCTGCTCAGAGAGTAGTTGTTTTCATTATTAATCCAAA |
| RPL17_NM_000985_r1_4 | /5Biosg/TTGATGGCCTGAGCAGTTTCACGAGTGTTCTTAAAGTGAACACGAAGATTGGAACC |
| (SEQ ID NO: 875) | TCTTGATTTGCATGATTTCGTGGGGTTCTCCGGGTCAAGTGAATAGCGAACCATTTTCACAGAT |
| RPL17_NM_000985_r1_5 | /5Biosg/CCCCATTGCTTGGCCTGCGCACACCTGCCAACTCCACCATTGTAACGTCGGAATGG |
| (SEQ ID NO: 876) | TACACACTGTTTCTGTAAAGTGACATCTTTCAGATACTTCGTGGCTTTTCGTATATGCATACCC |
| RPL17_NM_000985_r1_6 | /5Biosg/ATATGCTCAATGACCAGAGAATCTACATCTAAACCCTTAAGTTCAGCATTACTCTC |
| (SEQ ID NO: 877) | TGCGTTTTTAAGCATGTGCAGCAAAAATTCAGCACTCTTTTTGGGCCACCGACCTTGTGTCCAG |
| RPL17_NM_000985_r1_7 | /5Biosg/ACAATCTGTTCCTTTTCCGTAAGGATCATCTCAATGTGGCAGGGAGAGCTCATGTA |
| (SEQ ID NO: 878) | TGGGTTAATCCGACCATGAGCTCTGTAGGTCCGGCGGCGCATCTTAGGTGCTTTGTTCACTTGG |
| RPL17_NM_000985_r1_8 | /5Biosg/TTTTCCTTTTAATTACATTTATTTTAATGCTGAATTTACTCCCGTGCCATAAGTTT |
| (SEQ ID NO: 879) | TTGTTTCTTCAGTTTCTTCTGGGATATCTTTTTCTTCTGGGCAACCTCCTCTTCTGGTTTAGGA |
| RPL18_NM_000979_r1_1 | /5Biosg/TAGCCGGGCGATAACGGCAGAGAGCATAGAGCGCAGGAACAAGCGCAACGTCCAAG |
| (SEQ ID NO: 880) | AGGGAAGGGCCAGCACGTCGGGGGCCTCTCTGGCCCTACCCAGGCCGTGTTCTCGATAGCTTTC |
| RPL18_NM_000979_r1_2 | /5Biosg/GGGGTGGGCGGGGAAAGCCTCAAGCGAGTGGCGCCGCCGTGACGTCACATGGGTGC |
| (SEQ ID NO: 881) | GACGCGGCGCTCTACCACGATCCGGACTTCTCTGTGGTGAGTTGGACGACTGACTAGCCGGGCG |
| RPL18_NM_000979_r1_3 | /5Biosg/TCCTGGCTCTTGGGCTCCTTGCGCCGAACCTTTCGGTCCTTGTTATGGCGGATGTC |
| (SEQ ID NO: 882) | CACTCCCATGATGGCGCCTCCTGCTCGGCCAGGTCCGGAAAGAGAGAACGGGCTGGGGTGGGCG |
| RPL18_NM0_00979_r1_4 | /5Biosg/GCCGGTTGGTGCGACTCATAAACAACCTCTTCAACACAACCTGGTTGAATGTGGAG |
| (SEQ ID NO: 883) | TTGGTTCTTCTGGCCAGAAACCTGTATAACTTGACCAACAGCCTCAGGTAGATATCCTGGCTCT |
| RPL18_NM_000979_r1_5 | /5Biosg/TACCTCCTGAACCCGCACATCATCAGTTATGGTCCCCACAACCACGGCCGTCTTGT |
| (SEQ ID NO: 884) | TTTCCCGGCCAGGAAGCTTCATCTTCCGGATCATCCGGGAAAGGGACAGAGGCGGCCGGTTGGT |
| RPL18_NM_000979_r1_6 | /5Biosg/TTAGGGGAGTCCAGGGCCAGCTGGTCGAAAGTGAGGATCTTGCCCCCTGCCCTGAG |
| (SEQ ID NO: 885) | GATGCCGCTGCGGGCCCGGCTGGTCACGCGCAGTGCACATACCTTCAGTTTGGGTACCTCCTGA |
| RPL18_NM_000979_r1_7 | /5Biosg/AGCGGACGTAGGGTTTGGTGTGGCTGTGCCGGGTTCCTGGGGCCTTGCCGAAATGC |
| (SEQ ID NO: 886) | CGGTACACCTCTCGGCCCTTGCGAGGACCGGAGAGCAGGACAGTGCCACAGCCCTTAGGGGAGT |
| RPL18_NM_000979_r1_8 | /5Biosg/TTTGCACTGTCAGCAAAAATCTTTTTAATAAGAGAGTAGGATCCAGGGTTAGTTTT |
| (SEQ ID NO: 887) | TGTAGCCTCGGCTGGCCCGTCGGCCTCTGGCACGCTCGAACTTCCGGCCCTTGGAGCGGACGTA |
| RPL19_NM_000981_r1_1 | /5Biosg/TCTTGCCACAGCGGAGGACACTAGAGGCGAGCCTCTTCTGAAGCCTGAGCATACTC |
| (SEQ ID NO: 888) | ATGGCTGCGGCCGCAGCAGCGAAAGGAAAGAGCTCGCTCGGGCCCGGCTCCTCCCATTATCTGC |
| RPL19_NM_000981_r1_2 | /5Biosg/GCTTGCGGATGATCAGCCCATCTTTGATGAGCTTCCGGATCTGCTGACGGGAGTTG |
| (SEQ ID NO: 889) | GCATTGGCGATTTCATTGGTCTCATTGGGGTCTAACCAGACCTTCTTCTTGCCACAGCGGAGGA |
| RPL19_NM_000981_r1_3 | /5Biosg/CGGGCATTGGCTGTACCCTTCCGCTTACCTATGCCCATGTGCCTGCCCTTCCGGCG |
| (SEQ ID NO: 890) | GGCCAAGGTGTTTTTCCGGCATCGAGCCCGGGAATGGACCGTCACAGGCTTGCGGATGATCAGC |
| RPL19_NM_000981_r1_4 | /5Biosg/CTGTGATACATGTGGCGATCGATCTTCTTAGATTCACGGTATCTTCAGAGCAGCCG |
| (SEQ ID NO: 891) | GCGCAAAATCCTCATTCTCCTCATCCATGTGACCTTCTCTGGCATTCGGGCATTGGCTGTACCC |
| RPL19_NM_000981_r1_5 | /5Biosg/GCCAGGAGCTTCTTGCGGGCCTTGTCTGCCTTCAGCTTGTGGATGTGTTCCATGAG |
| (SEQ ID NO: 892) | AATCCGCTTGTTTTTGAACACATTCCCCTTCACCTTCAGGTACAGGCTGTGATACATGTGGCGA |
| RPL19_NM_000981_r1_6 | /5Biosg/CTTGGATAAAGTCTTGATGATCTCCTCCTTCTTGGCCTGGAGGCGCTCTTCACGGC |
| (SEQ ID NO: 893) | GCTTGCGTGCTTCCTTGGTCTTAGACCTGCGGGCCTCAGCCTGGTCAGCCAGGAGCTTCTTGCG |
| RPL19_NM_000981_r1_7 | /5Biosg/TTGCAGATTAAGGCTTGTTTTATTTTAATGGCTGATCTATGTAATCACAGAGGCCA |
| (SEQ ID NO: 894) | GTATGTACAGACAAAGTGGGAGGTTTTATTTCTTGGTCTCTTCCTCCTTGGATAAAGTCTTGAT |
| RPL21_NM_000982_r1_1 | /5Biosg/GGAACAACTCCATGTTTTCTAAAAGGCCTAGAGAACATATATCGGGTGCCTCTCCT |
| (SEQ ID NO: 895) | CTTTCCCTTTGTGTTCGTCATTTTGGCGAATTACTGGAAGATGGCGGTTCCGGCCGAAAGGAAA |
| RPL21_NM_000982_r1_2 | /5Biosg/CTCTTCCAGTTTTGCCATCGTAACACTTGTGGGGCATTCCTTTTTGAACAGTACCC |
| (SEQ ID NO: 896) | ATTCCCTTGATGTCTACAATATCACCTTTCTTATAGATTCGCATATATGTGGCCAAAGGAACAA |
| RPL21_NM_000982_r1_3 | /5Biosg/CTCTTAGAGTGCTTAATGTGCTCAATACGCACATTAATTCTCTTGGCAAGAATCTT |
| (SEQ ID NO: 897) | GCCCTTAACTTGTTTGTTTACAACAATGCCAACAGCATGCTGGGTAACATTGTAGACTCTTCCA |
| RPL21_NM_000982_r1_4 | /5Biosg/TGCTTCTCTGGGTGGAGCAGGCTGGCGCTTTAGTTGAACCCAGGTACCTTTCTCTT |
| (SEQ ID NO: 898) | TGGCTTCTTTCTTTTTCTGATCATTTTCCTTCACACGTTTCAGGAAGCTATCTCGGCTCTTAGA |
| RPL21_NM_000982_r1_5 | /5Biosg/TTTTTTGTAGCCCAGAGGTCCTTTATTTTTTTTTTTAACACCTATAATGCCATGAA |
| (SEQ ID NO: 899) | TTCATAGGGAATAGGTTCCAGCAGCTCAGGCTCCTTCCCATTGGTTCTCACAAAGTGTGCTTCT |
| RPL22_NM_000983_r1_1 | /5Biosg/CAATCAAGAGTGAACTTCAGAACTTGCTTCTTTTTTTTGCCCCCCTTCACCACAAG |
| (SEQ ID NO: 900) | CTTTTTCACAGGAGCCATGGCGGCAGCGGAGTTAGAAAGGGAGGTGAGCGAACTACGCAGACGC |
| RPL22_NM_000983_r1_2 | /5Biosg/CGATGGTCACCACCCCTCCACCAAGGTTCCCAGCTTTTCCGTTCACTTTGATCCTT |
| (SEQ ID NO: 901) | TCTTGCAAAAACTGCTCAAAATTGGCAGCATCCATGATTCCATCTTCTACAGGGTGGGTGCAAT |
| RPL22_NM_000983_r1_3 | /5Biosg/TACGCGCAACCAGTCACGTAGATTATTCTTCTTCAAATATTTTTTGGTGAGATATT |
| (SEQ ID NO: 902) | TCAAATACCTTTTGGAGAAAGGCACCTCGGATGTCACGGTGATCTTGCTCTTGCTCCTTTCGAT |
| RPL22_NM_000983_r1_4 | /5Biosg/AAGAACTCATACAAAATTTTCCAGATAAATGAAATTTAATCCTCGTCTTCCTCCTC |
| (SEQ ID NO: 903) | TTCTTCGTCCTGGTTAATCTGGAAGTAACGTAATTCGTAACTCTCTTTGCTGTTAGCAACTACG |
| RPL22_NM_000983_r1_5 | /5Biosg/AAATAAATGAGTGGCGAACCAAGGGAAGCCCTTTGACTATGATTTCCAATTTTCTG |
| (SEQ ID NO: 904) | TTCAATCCACACTGCAGAGATACAAGGATAAACCACCATTTTGGTTCCCAAGTTTTATTCAAGA |
| RPL22_NM_000983_r1_6 | /5Biosg/ACCCGCATCTGCCTCCCCAATGGCTGTCAGTTCGGTAAAGTCACCCTCTCCTTCTA |
| (SEQ ID NO: 905) | CTCTGGTATTACCACGAGAATTGAAATTTTTAAGCAGAAAAAAAAAGAAGTCAAGTTACAAATA |
| RPL22_NM_000983_r1_7 | /5Biosg/TTAATGAATGAGAGAAGCCCATTTGTATCCCTGAATCATTGAGAAAAGCAACAGAT |
| (SEQ ID NO: 906) | ACAACTGACAGTCACACTTTTTAAAATCAAACAGTCACTACCTTCAGCCCACACCTCCACACCC |
| RPL22_NM_000983_r1_8 | /5Biosg/TGCGTCAAGAGAAATTTGTAATCAAAAAATGAAAGTAAGACGAATGGCCCAGAAAC |
| (SEQ ID NO: 907) | CCGCATTTTATTGACAGTCATTTTCCCACAGAGAATCTTAGAAAGATGTCGCGTTTTCTTTTAA |
| RPL22_NM_000983_R1_9 | /5Biosg/GTTAATTTAGAACCTGGGACTTTTACAATCGATTCCCCAAACCCCTTTATGGCAGC |
| (SEQ ID NO: 908) | AACACTGAAGGAGCACAGTTTCTCTCTCTAGGAAGAAGAGGATTAGCAGACATAATTGTGTGCG |
| RPL22_NM_000983_r1_10 | /5Biosg/GGAGACCACATCTGGAAGCACTATTCCTACAGCTCCCTCTGCTGGAGACGAAAGTG |
| (SEQ ID NO: 909) | ACAGTTTGTTGCAAAGACCTGTAGAAACATTACTTACACGTTCATTTCTGTACACATTTAGTTA |
| RPL22_NM_000983_r1_11 | /5Biosg/GCACCTCCCACCTCCTTGGCATGGGAGGCTTCCCAGTCACTCCTCCTTCGTGTCCC |
| (SEQ ID NO: 910) | CTCTTTCAAGAACCTCCAGAGCTCTTGGCATCAGGGGCCCCCATTGCTGGGCCCCACACGGGAG |
| RPL22_NM_000983_r1_12 | /5Biosg/TGCATTTTTTTCCCAGCCTTGGTAGCCCCTTTCAGTTGTCTAGCCTCTGCACTGTG |
| (SEQ ID NO: 911) | GCACACCACTGACATTAAATCCAGTCATGGCCTAAGTGGCATGAGGCAGCTATTTCCAGGGCAC |
| RPL22_NM_000983_r1_13 | /5Biosg/AAAACATGAATTTTAGACACCGTAAATTCTAATGCAGACACTTTTGCATTACTGTT |
| (SEQ ID NO: 912) | TGAATTTCAGAAGGGCACCACAAGGCACCAGAGTCTTTCAAAGTCACTCACAGCAACAATTGCA |
| RPL22_NM_000983_r1_14 | /5Biosg/CAGAGCACCAAATGTTTAATGGGAGCCAAGGTAGGACTGAGCATTGAACTTCCAGC |
| (SEQ ID NO: 913) | TATGCAACTCGCAGGGCACAATTTCAAGTGTGGAAACCATCTGTAGGCAAGCTCTTTTAAAAAC |
| RPL22_NM_000983_r1_15 | /5Biosg/CAGAGAAGAAATATGCAAGCAATTCTGCTTCAAAGAAATTTGCATAGAAATGGAAA |
| (SEQ ID NO: 914) | AATGCCAGAGCCTTTAACACAAGTGAAATTGCAAAGCCTCAACACGTTCAACTCAATCCACAGA |
| RPL22_NM_000983_r1_16 | /5Biosg/AGTAGAATTTGTAAACTCAAGCCACAAACTTAGTTAATAATCATGGTTAAGGGACA |
| (SEQ ID NO: 915) | TTGCCAAAGAGCAACTGATGCCTCAGTGAAGTTTGAAAGAAACTCTGCTTTCTGTGACGGCAGA |
| RPL22_NM_000983_r1_17 | /5Biosg/TTTTCAAATCTGGGACTAGTTTCTTTTTTTCTTTTAACTGAAATGCCAACTTCAGC |
| (SEQ ID NO: 916) | CCAGGGTTTTTTCACAACCAAACTAAAAATGACTTACTACATGGGAACATCAATGCAACAAGTA |
| RPL22_NM_000983_r1_18 | /5Biosg/TTTTTTACAGTAAGAGTAGCCAGGTGTTAGCCACTTTAATAGAAAATATGATCAAA |
| (SEQ ID NO: 917) | ACTCGATTACAAGAGTTCAAAAAGACATAGAAAACCAGTGAGTTTCAATTTTATTACAAGTTTT |
| RPL23A_NM_000984_r1_1 | /5Biosg/GACACCTTTCAACACTGCCTTCTTGGCCTTTAAAGCCTTCGCTTTGGCTTCAGCTT |
| (SEQ ID NO: 918) | TAGGAGGGGCAGGAGCTTCCTTCTTCGCTTTCGGCGCCATCTTGTGAAAAGGGTCTCCAATGCT |
| RPL23A_NM_000984_r1_2 | /5Biosg/TCCTGGGAGCGCTCTTCCGAGGATATTTGGGCTGTCTCCGGAGTCGCAGTGTCTTC |
| (SEQ ID NO: 919) | GGCCGCCGGAAGGTGGGTGACGTGCGGATCTTCTTCTTTTTGTGGCTGTGGACACCTTTCAACA |
| RPL23A_NM_000984_r1_3 | /5Biosg/TTTAACATCCACAATGAACACAAGTGTGTTGTTGTCTTCTATCTTCTTCATGGCAG |
| (SEQ ID NO: 920) | ACTCAGTGGTCAGCGGAAACTTGATGATAGCATAGTGGTCAAGCTTGTTTCTCCTGGGAGCGCT |
| RPL23A_NM_000984_r1_4 | /5Biosg/GAACATATGCCTTCTTCTCTCCATCAGGCCGAATCAGGGTGTTGACCTTGGCCACA |
| (SEQ ID NO: 921) | TCAATGTCATACAGCTTCTTCACAGCCTGTTTAATCTGGTGCTTGTTGGCTTTAACATCCACAA |
| RPL23A_NM_000984_r1_5 | /5Biosg/TGAAAAGATATATATATATATATATTCAGAATTAGGCAGCTGGACTCAGTTTAGAT |
| (SEQ ID NO: 922) | GATCCCAATTTTGTTGGCAACATCCAAAGCATCGTAATCAGGAGCCAGTCGAACATATGCCTTC |
| RPL23A_NM_000984_r1_6 | /5Biosg/TTCAAAAGGATAAGTAGAACAGGAGTCTTGCCCAAGCCCTGTCATGTCAGTGTGTG |
| (SEQ ID NO: 923) | TGTGTGGCCTCCCAGCCCAACCAGAAATTGACAGACAGGCATGTATATGGTGAAAAGATATATA |
| RPL23A_NM_000984_r1_7 | /5Biosg/CTCAACCATGGAGGCAAGTTCTGAGTTCTGGTTTTCCTAGGACACTAACTCTAGTC |
| (SEQ ID NO: 924) | ACAAAGATCTCTGGAATGATCATACATGGTGGAGTGGCAGGGTGAGGTATTTCAAAAGGATAAG |
| RPL23A_NM_000984_r1_8 | /5Biosg/CCAATCCACACTCCCCTGAAATGGATGCTAACACCCTTCAAACCCTGGGCATTGGT |
| (SEQ ID NO: 925) | TTCATACACAGCCTCTTCCAGGGATAAAAGGGGTTCTTGTACAGCTTGTTACTCAACCATGGAG |
| RPL23A_NM_000984_r1_9 | /5Biosg/TCCTCTGAAGTCCTTGTCCTTTATTGGGCAAGGGGTGAGGGAAGCAGACAGACCGG |
| (SEQ ID NO: 926) | TTGGACATAGTAGATGGGTGTGTGAGGACAAAATGCTACCAGAGAGCCAGCCAATCCACACTCC |
| RPL23_NM_000978_r1_1 | /5Biosg/AGAGGACCCACCACGTCCTCGCTTCGACATCTTGAACGCCGGAAAAAAGAAAAAAG |
| (SEQ ID NO: 927) | GAAGTCGATTCAAAGGACACTGGGATATGAACTTTAACGCCCCGCCCACCCTCCTCACGTGGCC |
| RPL23_NM_000978_r1_2 | /5Biosg/GCCGTCCCTTGATCCCCTTCACGGAGATGATATACAGGTTTTTGGCTCCTGTGTTG |
| (SEQ ID NO: 928) | TCAGCACAATTGATTACAGCTCCTACCGGAAGACCCAAGGAAATCCGGAATTTCGCACCAGAGG |
| RPL23_NM_000978_r1_3 | /5Biosg/GACTTTCGTTGTCGAATGACCACTGCTGGATGTACCTTTTTTCTGAGCTCTGGTTT |
| (SEQ ID NO: 929) | GCCTTTCTTGACTGTGGCCATCACCATGTCACCCACACCAGCAGCGGGAAGTCTGTTCAGCCGT |
| RPL23_NM_000978_r1_4 | /5Biosg/ACACTCCTTTGCTACTGGTCCTGTAATGGCAGAACCTTTCATCTCGCCTTTATTGT |
| (SEQ ID NO: 930) | TCACTATGACTCCTGCATTATCTTCAAAATAAAGAAACACGCCATCTTTTCTACGGTATGACTT |
| RPL23_NM_000978_r1_5 | /5Biosg/TTTTGCAAACAAATACTTTTTAATGGGTTTAGTTTTTTTTTTTATTTTTTACAAAT |
| (SEQ ID NO: 931) | ATACTGGAGAATCATGCAATGCTGCCAGCATTGGATGCAATCCGGGGCCACAAGTCTGCACACT |
| RPL24_NM_000986_r1_1 | /5Biosg/CCGTCGGTCCTGGCGTAGCGCCTCCCGTGTCCGGGGTAGATCTTGTACCCGCTAAA |
| (SEQ ID NO: 932) | ACTGCACAGCTCGACCTTCATGGCGACAGCTCCACGGAAAGACAAAAGATGGCGAAAAGAAAGA |
| RPL24_NM_000986_r1_2 | /5Biosg/ACTGTCCCTTTTTGTGCTTCCTTCTGTAGAGGACAGTCCAGTTTATCTGCCGAGGA |
| (SEQ ID NO: 933) | TTCCTCTTGGAAAGGAAAGCCGACTCGCATTTCGCATTAAGAAACTGGAAAACCTTCCCGTCGG |
| RPL24_NM_000986_r1_3 | /5Biosg/CTAACTTCAGGTTTCTGATTCCTCTTGGCCATTATATCAGCAAGAGATGCACCAGT |
| (SEQ ID NO: 934) | AATGGCCCTCTGGAATTTGACTGCTCGGCGGGTTCTTTTCTTTTGAATTTCTTCCGACTGTCCC |
| RPL24_NM_000986_r1_4 | /5Biosg/AGGTGCTGCCTTTGTAGGTGCCTTAGCAGCAGCCATTGCAGTCTTTTTAGATGCTT |
| (SEQ ID NO: 935) | GCTTAGCCTTTTTTGCTTCCTTAGCAGCCCTGATAGCTTGTTCTCGTTGAGCCTTTCTAACTTC |
| RPL24_NM_000986_r1_5 | /5Biosg/TTTTTTTTCTAGAGTTATAATCCAATCTTTATTTAAAAATCTAATCTGCCAGTTTA |
| (SEQ ID NO: 936) | GCGTTTTCCACCAACTCGGGGAGCTGAAACTTTCACAGGCTTCACAATCTTTTGCTTAGGTGCT |
| RPL26_NM_000987_r1_1 | /5Biosg/AGTCACAAAGGGATTAAACTTCATTTTGGCCGCTCCCGCTTCGGTGATGGCCGCAA |
| (SEQ ID NO: 937) | AAGGGAAGAGAACTACACGCTGCTTCCGGTTCTGTAAGTTTACCAAAGATCTCGCGAGACCTAT |
| RPL26_NM_000987_r1_2 | /5Biosg/CATGGATCGCACGTTGTACTTCTGTCTCAGCTCTTTGGAAAGAGGGGAAGACATAA |
| (SEQ ID NO: 938) | TCTTCCTTCGAATGTGGGAAGGTGCATTGAAATGCCTTTTGCGATTCTTGCTTCGGTCGGAAGT |
| RPL26_NM_000987_r1_3 | /5Biosg/GCTGCACCCGTTCAATGTAGATAACATATTTCTTCCTGTAAACCTGGACTACTTTG |
| (SEQ ID NO: 939) | CCAATTTGCTGACCTTTATAGTGTCCACGTACAACCTGAACTTCATCATCCTTTCGGATGGGCA |
| RPL26_NM_000987_r1_4 | /5Biosg/CGAGATTTGGCTTTCCGTTCGAGGATCTTTTTGCGGTCTTTGTCCAGTTTTAGCCT |
| (SEQ ID NO: 940) | AGTGATAACCACCTTGCTGGGGTGAATGCCTACGTGGACAGTTGTGCCATTAGCCTTTTCCCGC |
| RPL26_NM_000987_r1_5 | /5Biosg/TTTTTTTTCAGGCTCTTTGTTTCAAGTTTTAATCAAAGCTTGTATATAAGATTACT |
| (SEQ ID NO: 941) | TTATTCCTGCATCTTCTCAATGGTTTCTTCCTTGTATTTGCCCTTTTCCTTTCCTACTTGGCGA |
| RPL27A_NM_000990_r1_1 | /5Biosg/AACTGTTGAAGAATCGGGGCTAGGTGTGCTGTACTGCACGCCGCCCGTGCTTGCTT |
| (SEQ ID NO: 942) | GAGCCAGGCCCTTTTCTGGCGCCTTGGTCAGGGAACCGCCTAAGCCGACCCTAAGGGCCTCGTT |
| RPL27A_NM_000990_r1_2 | /5Biosg/GGGATTGCGCGCCTGCTAGTCGCTTCCTCTTTCTGAGGGTGGTGATCCCCCATCAC |
| (SEQ ID NO: 943) | GGAGTGTCCTGGTGGCGGTGTACGGTTTCGGTGAGGCTCGTTGTGCTAGGCTCGGAGGGCGAGA |
| RPL27A_NM_000990_r1_3 | /5Biosg/CCCAGACGAAAAAGGAAGGCCTTCGCCAAGTCTCGCGAGGTATCGGCCACGGGGGC |
| (SEQ ID NO: 944) | GGGGCAAAACGCCTCACTTCCGGTCACAGAGGCCGGGCTTCGGGCGGGGCCTCCTGGTCTCGCG |
| RPL27A_NM_000990_r1_4 | /5Biosg/ACCACCAGCATTACCGCGGCCGCCGGGGTGCTTCCGGTGCTTGCCTATGCGGCCGT |
| (SEQ ID NO: 945) | GGCCGTGGCTCACGTGGCCCCTAAGTTTCCGGGTCTTCCTCAGTCTGGATGGCATGTTGGCAGC |
| RPL27A_NM_000990_r1_5 | /5Biosg/TTGTCAAGGTTGACAGTTGGGCAGAAGCTCTGGTTCCTCTTTAAGTGGTAATGCTT |
| (SEQ ID NO: 946) | CATACCAACTTTCCCAAAGTAGCCTGGGTGGTATTTGTCGAAGTTGATCCGGTGGTGATGCAGA |
| RPL27A_NM_000990_r1_6 | /5Biosg/GCTTTCCCTTTCCCAGAACTTTGTAGTAGCCCGATCGCACCACATCAATGATGGGA |
| (SEQ ID NO: 947) | GCAGCCCCAGTCTTGTTTTTAGCAGCATTCACCCGTGTCTGTTCACTGACCAAAGTCCACAATT |
| RPL27A_NM_000990_r1_7 | /5Biosg/TGAAACTCCCTCCATGTGGCTTCAAGCCACCAGGACACAGGCCCCCCCAACACTCT |
| (SEQ ID NO: 948) | TAATCTTCTCCTCAGCTCTTCTGCTGAAGAATTTGGCCTTCACGATGACAGGCTGCTTTGGGAG |
| RPL27A_NM_000990_r1_8 | /5Biosg/AGGACCCCATGTCTTCATACCCTAAGTACTAGAACCTGGGCTCCCAATGCACACAG |
| (SEQ ID NO: 949) | GATGTAGAGGTGCCACTGAAGAACCTACACTCACACCACAAGGAAAAAGTAGTTAGCATTTAAT |
| RPL27A_NM_000990_r1_9 | /5Biosg/ATACATGCAGGCCTTTCAGTGATCAACAGGTATTATTCTGACTTTATAAACAGAAA |
| (SEQ ID NO: 950) | TGTTTAACTGGCCAACGTCTGTGTTGGTCTTACGTTTACCATATATTTGAGGGAAGTCAGGAGA |
| RPL27A_NM_000990_r1_10 | /5Biosg/CTCATTCCTATCACACTGCCCCTCTTTAGAATGTGACCCATCAAAATGGAATCTTT |
| (SEQ ID NO: 951) | CCTTTTGAGCCCTGTTGAACAATTAGGGTACATTCTCTCATTCACTGTAAAATTCAGAGTACAA |
| RPL27A_NM_000990_r1_11 | /5Biosg/GCCGAGATCGTGCCACTGCACTCCAGCCTGGCAAGAGAGACTCCGTTTAAAAAAAA |
| (SEQ ID NO: 952) | AAAAAAGATGAGGGGGCCACGTGGAAAAACCTTGGGCTGAGAACTTAAGTCCTAAAGGACCATC |
| RPL27A_NM_000990_r1_12 | /5Biosg/CCCATCTCTACTGAAAATACAAAAATTAGCTGGGCATGGTGGTGGGCGCCTGTAAT |
| (SEQ ID NO: 953) | CCCAGTTAGTCAGGAAGCTGAGGCAGGAGAATCGCTTAACCTGGGAGGCGGAGGCTGCAGTGAG |
| RPL27A_NM_000990_r1_13 | /5Biosg/TTAAGGAGCCATGGCCGGGCGCAGTGGCTCACACTATAATCCCAGAACTTTTGGAG |
| (SEQ ID NO: 954) | GCCGATGTGGGCAGATCACTTGAGGTTAGGAGTTAGAGACCAGCATGGCCAACATGGTGAAACC |
| RPL27A_NM_000990_r1_14 | /5Biosg/TTTCAAACCCACTTTGACATACAGAAAAGCCCTGGCATACTGAAATTTCAGATTGC |
| (SEQ ID NO: 955) | TGGACCCCCATCTCGAGATTTTGATTCATCACATTCTGGATGTAACAATAATTTGGATCAAGAT |
| RPL27A_NM_000990_r1_15 | /5Biosg/GTCACCATCAGTTTTCCAATAGCAAGAGACACAAATCCTAGAAAAACTTATTTCAA |
| (SEQ ID NO: 956) | TTTCCAGCCTTCAGGATTTCCAAATTTTCCCGATACATTTCAGACTAGAAGAAAAATTAACTAT |
| RPL27A_NM_000990_r1_16 | /5Biosg/AGTTTTAGACTGTATTATTTTGGGTCAAAAAAAGCTCAAAATCACAGGAAGAACCA |
| (SEQ ID NO: 957) | TAAAACTGTAGCAAATTATAATTTACCGAGATCTATGAGGATCTTATTTGTAAACATGAATTGG |
| RPL27A_NM_000990_r1_17 | /5Biosg/TCCTGACAGATGTGTCCCATAGACAGCCATGGTTCTCGGCTTATTATGACCCCACA |
| (SEQ ID NO: 958) | GTGCACTAAGGAAACCTCCACTAACTAAAACCCAGGAGTCTAAGTGCCATCTTATTTGTCTATA |
| RPL27A_NM_000990_r1_18 | /5Biosg/TTTAAAATTGTCCAGCTGAATCGAGGTTTCACTACTTGTAATTCTAGCCTATTCTT |
| (SEQ ID NO: 959) | ATGTAAGCCAATTCAGTGCTTCTCTGTGCCTTCTATTTGATCCCCAACATCCTCTAAAGGTTGT |
| RPL27A_NM_000990_r1_19 | /5Biosg/GGCTAATTTTGTGTATTTAGTAGAGACAAGGTTTCTCCAGGTTGGTCAGGCTGGTC |
| (SEQ ID NO: 960) | TGGAGAGCCCTTATTTCTAACTTCTCCAGCACAACAGAAGATACAAGCCAAATGATACATTTGT |
| RPL27A_NM_000990_r1_20 | /5Biosg/TGTTGCCCAAGCTGGAGTGCAATGGCACGATCTCGGCTCACAGCAACCTCCGCCTC |
| (SEQ ID NO: 961) | CTGGAGATTCTCCTGGCTCAGCCTCCAAAGTAGCTGGGATTACAGGCATGTGCCACCACGCCTG |
| RPL27A_NM_000990_r1_21 | /5Biosg/ATGAACTACTGACCACTTATTGTGGGATCCTTGGATTCAGGTTCCATATTACAAGT |
| (SEQ ID NO: 962) | CCTCTATGGGCCCTAATGGAGAGCCCTTACTTTTTTTGGGGGGGGTGGACAGAGTTTCACTCTT |
| RPL27A_NM_000990_r1_22 | /5Biosg/TTTTAATCTACACAATCCTCAGGTAGGCACTTTCACTGAAATTTTAAAGATGAGGA |
| (SEQ ID NO: 963) | AATTAGGACTAAAAGTCACACAGGTATTGGGTGAAGACCAAATATTGAGTCTTTTAATTCATCA |
| RPL27A_NM_000990_r1_23 | /5Biosg/GTCTGAACCTAGGAGGCGGAGCTTGCAGTGATCTGAGATCGCACCACTGCACTCCA |
| (SEQ ID NO: 964) | GCCTGGGCGACAGAGCGAGACTCCGTCTCAAAACAAAACAAAAAATTAAGTGCACGGTTTCCAT |
| RPL27A_NM_000990_r1_24 | /5Biosg/CGAGACCATCCTGGCTAACACGGTGAAACCCTGTCTCTACTAAAAATGCAAAAAAT |
| (SEQ ID NO: 965) | TAGCCGGGCGCAGTGGCGGGCGCCTGTAGTCCCAGCTACTTGGGAAGCTGAGGCAGGAGAATGG |
| RPL27A_NM_000990_r1_25 | /5Biosg/TAATAGTTTGCACTTAAGTTACTAAGTCAAACACAAAAATTAAGTGCCTGGGCCGG |
| (SEQ ID NO: 966) | GCGCGGTGGCTCATGCCTGTAATCCCAGCACTTTGGGAGGCTGAGGCGGGCAGATCAGGAGATC |
| RPL27A_NM_000990_r1_26 | /5Biosg/CATAGCACTTCCCGTTTGCCTAACCTTCCCAAACCAGTTTCCTGAACCAGTATTCC |
| (SEQ ID NO: 967) | CTCTGCTTGGACCAATTTCCCACTGACAATCACATGAAGGCCAATTGACTCCATCTGCTCCCGT |
| RPL27A_NM_000990_r1_27 | /5Biosg/GTCCATTATGCCGTCTGAATCGTACCTTTTCCATACTCACTCCCATTTTCTTGGTT |
| (SEQ ID NO: 968) | CTGCCTTCAGCCTCCCATTGTAGCCGTCCTTTACAGCCCGGCCAGAGTAATCTTTCTCTCCACC |
| RPL27A_NM_000990_r1_28 | /5Biosg/ACAACTCCTGGGGAAGAAGGTAGCCATTAAGGGACTAGGGATCCTTCCCCCCAAAC |
| (SEQ ID NO: 969) | TCTACTTCCTTCCATGCCTTATCATTTTGTGGTCGGCCCACTACAATTCAGTCTCCAAGTCCCG |
| RPL27A_NM_000990_r1_29 | /5Biosg/TCTGTTCCTCATCACATGAAACAGTTTTTAGAACTGTTAGTAGCTGTAGCTTCTGG |
| (SEQ ID NO: 970) | TGAGTGAACAAGCCAGCAACGAAATCAGTGTTTCTTTCCCAGGCCAGGGGATCGGATGGCCTAA |
| RPL27A_NM_000990_r1_30 | /5Biosg/TATGAGCCTCCATGAACACAGCAGGCTATTCAAAGCTTGGCAGTCATGAAAATATT |
| (SEQ ID NO: 971) | TTAGTAAATGCGGGTTCAAGAAAGCACTGGAATCGGCGGACTTAGGGCTCAAAACTATTTTCGT |
| RPL27A_NM_000990_r1_31 | /5Biosg/ATCAAGTTGCACCTGCAGCTCCCACGTTTGAACGCAACTATATTTAAGGCATATAT |
| (SEQ ID NO: 972) | ACATTAGACCAGAAATTAGATCTTTTGCAATTCAAGCTTTAGCCAGCCACTAGAGATCGCCAGT |
| RPL27A_NM_000990_r1_32 | /5Biosg/GCTAGTTAGCCGCTAAGTAGGGTTTAGTAGTACATTTATTTTGATTGAAAGCTCGC |
| (SEQ ID NO: 973) | CTGATTTAGCTGCCCTTGACGAGCACTGCTTGTGCAAATTATGTGGCAGCCATTTGTCATAAAA |
| RPL27A_NM_000990_r1_33 | /5Biosg/CCACTGAGGTCGGGTCGTGCTGACTGATGAACGCGGCCGATGGAGCCACCAGGTGG |
| (SEQ ID NO: 974) | GCGCTGCACAGCTTCCGCCCGCGCTTCCGACTTGCAGTCCGTCCGTGGGCTGTCTGCTCTTGGG |
| RPL27A_NM_000990_r1_34 | /5Biosg/GGGCTTCTTCCGGTCTGGGACGCGGGGGAGTCATCGTCTCCGGAAGTAGAAGCTAC |
| (SEQ ID NO: 975) | TCACCGGAAGTGGTTCTCAGGTGCCGGGGTAAGACCCAAGGTCCGGTCTGTGTTGTGAGGACGC |
| RPL27A_NM_000990_r1_35 | /5Biosg/CGCCCAAGGACCAGGGGTGGAGTTGAACATCCCGCCTCTCCAGGGGAGTTATCTGC |
| (SEQ ID NO: 976) | GCTCGCGCACCACTGGCCGGCTCCGCCCTTGCCGGAAGTGGCCGAGCGAGGCCGGTCTCCGCCG |
| RPL27A_NM_000990_r1_36 | /5Biosg/GGAGGTTCCCATCTCGAAGATTTACGTAAAGGCCACGCCCACTGTTCTTAAACGCA |
| (SEQ ID NO: 977) | CCCTAAAGGGGCTCGAAGTGCGGCGAGGTTGGCCATTCCTCCGCTTCGAAGGGGACCCACGGCC |
| RPL27A_NM_000990_r1_37 | /5Biosg/ATTCCTTTTATGTTCTTCTAGAATATTTCCATCCGTGTACAAGCACTTTCTTTTTT |
| (SEQ ID NO: 978) | AGCCCAAAGTGCCCTTGAATGTCGCTGACGCTCATTACCTTTTAGACAATTGAGACAAATTCTG |
| RPL27A_NM_000990_r1_38 | /5Biosg/TTCTCAAGATACTTTCGCTCCATTTATATTGCCTCTCAATATGAAAATACGCATTG |
| (SEQ ID NO: 979) | GGTTGAACAAAAAACTGCACCAAAACATACTTCGTGCTCATTTCCCTAACCTCCTAAGAGGAAA |
| RPL27A_NM_000990_r1_39 | /5Biosg/ATTCCAAAACAAATTTATTTGCCTGTGGAGGTGGGGGTGTAATTTAAAAGGCCATG |
| (SEQ ID NO: 980) | AAAACTCTCGAAAGAGAAAATATTACTTTTCAGCAACGGCAAGTTCTGGTAGTTTTTTTTTTTT |
| RPL27A_NM_000990_r1_40 | /5Biosg/AGAGGAAAATAAAAATTGGGATGTAAAATAGAGCCAGGAATTAAATTTACGCTTTA |
| (SEQ ID NO: 981) | ACCTATATTCTTGCTAGGGGAGCTACACAAAATACGTTTCTAGAGCCAGATGATGTGGTATGCA |
| RPL27A_NM_000990_r1_41 | /5Biosg/TTCAGTTACATTTTTGTTAAAAACATCTTTTCGCATGTACACTTATAACCTACTTT |
| (SEQ ID NO: 982) | ATACCAAAATGACTTACAGGGATACACAAACTAGGTTATTTGAAACAACGTAAAGTGGGAATGA |
| RPL27_NM_000988_r1_1 | /5Biosg/GATGACAGCTTTGCGTCCGGAGTAGCGTCCAGCCAGGACAAGCACCACCTTCCCAG |
| (SEQ ID NO: 983) | GTTTCATGAACTTGCCCATTTCGGCAGCAACCACCCGGCCCTACCAGCAAAAAGGAAAGAAGGA |
| RPL27_NM_000988_r1_2 | /5Biosg/TCTCTTGGCGATCTTCTTCTTGCCCATGGCAGCTGTCACTTTGCGGGGGTAGCGGT |
| (SEQ ID NO: 984) | CAATTCCAGCCACCAGAGCATGGCTGTAGGGGCGATCTGAGGTGCCATCATCAATGTTCTTCAC |
| RPL27_NM_000988_r1_3 | /5Biosg/AGCAGGATCTCTGAAGACATCCTTATTGACGACAGTTTTGTCCAAGGGGATATCCA |
| (SEQ ID NO: 985) | CAGAGTACCTTGTGGGCATTAGGTGATTGTAGTTATACACTTTCACAAAAGATTTTATCTTTGA |
| RPL27_NM_000988_r1_4 | /5Biosg/TTTTTAATGATCAAAACAAAGCATCTAAAACCGCAGTTTCTGGAAGAACCACTTGT |
| (SEQ ID NO: 986) | TCTTGCCTGTCTTGTATCTCTCTTCAAACTTGACCTTGGCCTCCCGTCGGGCCTTGCGTTTAAG |
| RPL28_NM_000991_r1_1 | /5Biosg/GCTGTAGGTCTGCTTATTCCTCTTGATCAGGAAACTGGAGCAGTTCCGCACGACCA |
| (SEQ ID NO: 987) | TCCATTGCAGATGCGCAGACATGGCGGCGGCTCCCTTCGCAGCGGCGACCTGAGACGGAAAGAG |
| RPL28_NM_000991_r1_2 | /5Biosg/CTTAATGACCACCACGACACCTTTGCCGTCGGCTGCCGGCTCCACGCCCACAGTCT |
| (SEQ ID NO: 988) | TGCGGTGAATCAGTCCGTTGTAGCGGAAGGAATTGCGGGCCTTCAAGTTATTGGGCTCAGTGCT |
| RPL28_NM_000991_r1_3 | /5Biosg/GGGGCGGTACTTGTTCTTGCGGATCATGTGTCTGATGCTGCTGAGCGTGGCGCGAG |
| (SEQ ID NO: 989) | CATTCTTGTTGATGGTGGTCCGCACATAGGAGGTGGCAGGCTTCCGCTGGCCGGATCTCCGCTT |
| RPL28_NM_000991_r1_4 | /5Biosg/CTGGGGGCAGGGGGCTCAGGAGCTCTTGGTGGGGCGGGTCCGCTTCCTCTTCACCA |
| (SEQ ID NO: 990) | TCACAGGCTTCTGGCTGCGCAGGATGGCGCTGGCCCTGCGGATGGCTGCCATGCGCAGGTCGGG |
| RPL28_NM_000991_r1_5 | /5Biosg/TGCAGAGTTTTGATGACATGGCCTGAATGACAACACACAGGGCCAGAGCTCCCCAG |
| (SEQ ID NO: 991) | AGCGTTTCAAAAAGGGAGGCCCAGTCGAGGCAGGTGAGAAAGCCAGCTGACTTTATTGCTCTGG |
| RPL28_NM_000991_r1_6 | /5Biosg/GTCAGCAAACTTTTTCTGTGAAGACAGTGACCCTTGCCCTCACCAGGGACAAGGCA |
| (SEQ ID NO: 992) | GCTACCCCACCCCTCCTGCATGGCCAGCCATTGACATCACCTCCAGATGGACAAGGTGACATGC |
| RPL28_NM_000991_r1_7 | /5Biosg/CCCTCAGCCTGCACCCTTCTGGGCTAGAALAGGCCTTTCTTCTTCTGAATGGAAGC |
| (SEQ ID NO: 993) | CACTGCCCCAGCTGGGATTCTTCAGGCCACCTCACAATGGGACAGTAGGTCTCAATCACAAGTC |
| RPL28_NM_000991_r1_8 | /5Biosg/CCACTCCCTGGATGCAAAAGTCATCTCATCTTCCTCCCGTGATGTCTGTCGTCCCC |
| (SEQ ID NO: 994) | CAGGTCTTGGGAACACCCCAAGTCCCCAAACCGTGCTACAGCACCAGGGCCCAGGGCCCAGCCC |
| RPL28_NM_000991_r1_9 | /5Biosg/GGCTGTACCCTGGGGCTGCCATCTCCCTTACAGTTATAAGCCACCACCCACCAAGT |
| (SEQ ID NO: 995) | TGCCCATCTCAGAGATGAGGTTGCATCAAGTAAAGCCCATCCCCTCCAAATGTGGCTGCACCCA |
| RPL28_NM_000991_r1_10 | /5Biosg/AGCGGCCACTGAGATGAGACCTAAGTGACAACAGCCAGCTCAAAGAGACAGGGGAG |
| (SEQ ID NO: 996) | GGATGGGGACACCTGGAGGACGGGAGTAGGGGGACAATGCTAAGGCTGCTCAATGCCTGCTGGC |
| RPL28_NM_000991_r1_11 | /5Biosg/TAGGATGGTCTCAAACTCCTGGCCTCACAAGCTGTAATAAACACTAGGGAGCAAAC |
| (SEQ ID NO: 997) | AGGCCAAAGGAAACAAGAGGGCTGGGCAATCAGGAAAGCTTGGGTGACAGGGTGGCCCAGGAGC |
| RPL28_NM_000991_r1_12 | /5Biosg/CTCAAGTGCTCCGCTCACCTCAGCCTCTACTCAACCTCTGAGGAGCTGGGACCACA |
| (SEQ ID NO: 998) | GGCGGTGCACCACCACACCCAGCTAATTTTATTTTAGAGACGGTGTCTCATTATGTTGCCTAGG |
| RPL28_NM_000991_r1_13 | /5Biosg/TGTGAGGATCAACAGCAGGACTCTTTCCCCATCCAGGCCTCACTGTGTGTCATGGT |
| (SEQ ID NO: 999) | GTCTTCCAGGCTGGAGTGTAGTGGTGGGGCTCATGGGCTCACTGCAGCCTCATACTCTTGGCTC |
| RPL28_NM_000991_r1_14 | /5Biosg/AGGGAGCAGAGTCCTTCTTTGAATCGGGTACCCCAGGATGGCAGGAACCAGGGGTG |
| (SEQ ID NO: 1000) | CCATGGATGCTGGATCCTTGGTCCCTGGCAGTGGCTGACAGAGTTAGGTGCCCAGGAAACATGT |
| RPL28_NM_000991_r1_15 | /5Biosg/AGGGCAGTGGTCTGCCTCAAAACGCAGGGCTCCCAGCCCCGTACGACCCCAACCAA |
| (SEQ ID NO: 1001) | TGGCAAGTCGAGGCCCTGACAGTCCCCTTACTCTCAGTCAGAGCCGGGGGTGGTCTCAGACAGG |
| RPL28_NM_000991_r1_16 | /5Biosg/CCCAACTAAGGGAAGGACAAAGGAAATGGTAATTCACAGCAGACAGGGGCTGGCAA |
| (SEQ ID NO: 1002) | GTGGTCAGATCTGCTCTCCTTCGAGCTGGGCAAGACTGGAGCAGACAGGACTGAGGTCGGAAGG |
| RPL28_NM_000991_r1_17 | /5Biosg/AGTGAGGCCAGCTGGAGGTGGGCCTGAGTGGGATTGGGACAGTGCGGGGGGTCCTG |
| (SEQ ID NO: 1003) | AGCAGGTACCAAGTCACCCAACTCAGTTTTAAGGCAACACCTCTCAATCTGAGCTAATAGACCC |
| RPL28_NM_000991_r1_18 | /5Biosg/TGAGCAGTGAGCTCTCCTTATGAAGGCGGAGTCCCAGCGCAGTGAGGCCAGCCAGA |
| (SEQ ID NO: 1004) | GATGGGCCTGAGTGGGACTGGGACAGTGGGGGCTCCTGAGCAGGTACGAAGTCACCAGCGGAGT |
| RPL28_NM_000991_r1_19 | /5Biosg/AGACAAACATGAGACAGATAAACCTGCCAGCTTGTGGGCTGCAAATCAGTGCTGTG |
| (SEQ ID NO: 1005) | GAGGACAACTGAAGCAGGTGCCAGGGGAGAGGCCTCACGAGAAGGGGCCATCTACTAACGTGAG |
| RPL28_NM_000991_r1_20 | /5Biosg/AAGTCTCCAGTGAGCAAACTCTCAGGACCGGTGGGCTTTATACATTCAATATGCAC |
| (SEQ ID NO: 1006) | CATTCATCAAGCATCTCATTATATGCTGGTGTGCTAGACAAACCCCTTGCCCACCAGCACAAGA |
| RPL28_NM_000991_r1_21 | /5Biosg/ACTCGGGAGGCTGAGGCAGGAGAATCGCTTGAACCCAGGAGGTGGAGGCTGCAGTG |
| (SEQ ID NO: 1007) | AGCCAAGATCGCGCCATTGCACTCGCCAGCCTGGGCAACAGAGCGAGACTCCATCTCCAGAAAG |
| RPL28_NM_000991_r1_22 | /5Biosg/GGTGGGTAATTTGAAGTCAGGAGTTCCAAACCAGCCTGGGCAAAATGGTGAAACCC |
| (SEQ ID NO: 1008) | CATCTCTGCTAAAAATACAATACTGAGCTGGGTGTGGTGACACCCACCTGTAATCCCAGCTACT |
| RPL28_NM_000991_r1_23 | /5Biosg/GGCACAAGCCTCCAGGGCAGGCAAGGAGGTGGTTAAGGACAAGGCCTTCTGAGCAG |
| (SEQ ID NO: 1009) | CAGCAGCCACATCAGAAAGCCTCGAGCGCCTGTAATGCCAGCACTTTGGGAGGCTGAGGCAGGT |
| RPL28_NM_000991_r1_24 | /5Biosg/CAGAGGCCCACTAAGCTGGGCTGTGTTACGGATGAGACCAGGGGAGGCCACACAGC |
| (SEQ ID NO: 1010) | AGGGAGGATTCAGATAGGGATGGAGAAAGCCAGCAGGACTCCACAGGGGGTGGGGCCTAGAGGC |
| RPL28_NM_000991_r1_25 | /5Biosg/CATCTCCCTCCCTCCAGCCCTCTCCTGGTTCCTCCACCCCAACCCACCGATAGCAT |
| (SEQ ID NO: 1011) | TCAGATACCAGACGTGGCCTCCCCAGCCCAGCCACACAGACAGGCTGGCCACCCGCAGGAACAG |
| RPL28_NM_000991_r1_26 | /5Biosg/TGGAATAGATGGCCCCATCCAACATCTCTCTCTCCAAGATGAGGTCTAGAGGAGGG |
| (SEQ ID NO: 1012) | AAATGGTGTCTCCACGTTTGCTCAGCACACTGAGGACTCCAAACTCTGTGGGGCTGAGACCATC |
| RPL28_NM_000991_r1_27 | /5Biosg/TCTTTGGCTTTCAGCATTTTTACTATGGTGAGCCTGCCTGTTTTCTTAATATCATG |
| (SEQ ID NO: 1013) | TTTTTGGTTTAACTGGTTTTCCAATTTCCAGGCCAACAGACATGATTTGTGTGAATAAAGCTGG |
| RPL28_NM_000991_r1_28 | /5Biosg/CAGCACTCTGGATGTGTCCCCACTGCCTGGGCCTGGTTTCTGATGAGGGCAGCTAC |
| (SEQ ID NO: 1014) | TAACTTTATCAGGGACCTTCTGTATGTGACAAGACGCTTTTCTTTTGTTCTCCCAATTTTGTCT |
| RPL28_NM_000991_r1_29 | /5Biosg/GAGCTGGGACTGGAACCCAGGCAGTTTGATTCCTGGCTTCCGTGAACCATTAGCCC |
| (SEQ ID NO: 1015) | TGAGCTGGGAATGCTGCCGGGCATCACTCTTGGGGATAGGATGACCTGGGGGAGGTTCTTTCAG |
| RPL28_NM_000991_r1_30 | /5Biosg/CACCTGCCTTATGCAGGGCTGTGAAAGGCACTCAAAATGGCCTTTTACATATGGGA |
| (SEQ ID NO: 1016) | AACTGAGGCACGGTGCTACTAAACGAGCTGCCCAAGTCCCCACAGCTGGGCATAACTGGCAGAG |
| RPL28_NM_000991_r1_31 | /5Biosg/GGAGTCCCCAGCGCTCTGCACAACTTTGGGCTTGGCAGCCTTCCAGGGTGCGCCCT |
| (SEQ ID NO: 1017) | ACGCTCACTCACCATGCAGCTACTGGACTAAGAGCTGGAGAGACAGCAGTGAACACTGAGACAC |
| RPL28_NM_000991_r1_32 | /5Biosg/GGAACTTGCCCAAGGTTGCACAGCCACCGAGCAGCAGAGCCCTGACCCAGTAGATG |
| (SEQ ID NO: 1018) | CCAGCATGTCCTGTGAACAGAGGATGCCTCAGTCCCGAGTCTCTGCTGCTGTGGGGAGTCTGGA |
| RPL28_NM_000991_r1_33 | /5Biosg/GATTTGTGGGCACAGTCAAGCAGGTTTTGCACATTTAATCTTCTCATCAACCCTGA |
| (SEQ ID NO: 1019) | GTAGTAGGGTCTATCGACACGCATGTTACAGATGAGGGTACGAAGACACAGAGAGGTTGAGGAA |
| RPL28_NM_000991_r1_34 | /5Biosg/GAAACACGAGCATTAGTTTGTGTACAAATTAGTCATAGGCATGTGAAGACATCTGT |
| (SEQ ID NO: 1020) | GATCATGAGTCCATCTGATCAAAATATTTATAAAAAGTCATTAATTTATTCCTACAATCAGGAT |
| RPL28_NM_000991_r1_35 | /5Biosg/TATTCACAAACACGGGCAGGAGGCTGGGAAAGCTCACAGCCCCACAGGACGGCGGG |
| (SEQ ID NO: 1021) | GCAGACCTGGAGCCACCAGGCATTACTGCACATGGATCTGGCATGTCTTCCAGGTGCTTGGGAA |
| RPL28_NM_000991_r1_36 | /5Biosg/TTTTTAAAGTAGATGATTTTATTCTAGTAACTGGCTACAAGAGAAACAGGGGAATT |
| (SEQ ID NO: 1022) | GATACCATTCCTGGGCAGCGCCAAACAGCCTGGGCTGGAAATGCAGCTGAGGACAGAATGATAT |
| RPL29_NM_000992_r1_1 | /5Biosg/GTGGTGTGGTTCTTGGACTTGGCCATGTCTGCACCATAAGCCGCGGCTCCCGAAGC |
| (SEQ ID NO: 1023) | GCCTAGAACCGGAAGAGAAAGGGGCTGCGGTGCAGCACGGGAAATAGGGTCAACAACGCCGGAA |
| RPL29_NM_000992_r1_2 | /5Biosg/CTTGGCAAAGCGCATGTTCCTCAGCAACTTGGGGTCCACCCCCTTAAGAGATTCGT |
| (SEQ ID NO: 1024) | ATCTTTGTGATCGGGGTTTCTTGATACCATTTCTGTGCCATTTTCGGGACTGGTTGTGTGTGGT |
| RPL29_NM_000992_r1_3 | /5Biosg/GGGATCTTGGGCTTAACCTCCTTGGGCTTTACGAGGGCCTTGATAGCCTCGGCACG |
| (SEQ ID NO: 1025) | TGCACTCATGGCCTTGGCATTGTTGGCCTGCATCTTCTTTAGGCCCTTTTTGTTGTGCTTCTTG |
| RPL29_NM_000992_r1_4 | /5Biosg/CTTGGCCTTTGGCCGGCACAGCCTGAGCCCCTTGGCAATACGGGCACGAGCACGCT |
| (SEQ ID NO: 1026) | TCCCAAGCTTGGGGTGGGCAATGTAGGCAAGTCGATCGAGCTTGCGGCTGACACCCTTTGGGAT |
| RPL29_NM_000992_r1_5 | /5Biosg/AGAGATATCTACTCTGAAGCCTTTGTAGGGGCCTGGGTACGTTTGGGAGCCTGAGC |
| (SEQ ID NO: 1027) | TGGAACTGAAGCTGGGGCTGCAGCCTGGGCCTTGGTTTGATCCTTGGCCTTGGCCTTGGCCTTG |
| RPL29_NM_000992_r1_6 | /5Biosg/TTTCCTGCCTCAGGTTTATTTGTACAAATAGCACAGGAGGACCCCAGCCCCATGCA |
| (SEQ ID NO: 1028) | GATGGTAGCCCAGGGGCGGGGGTGGGGGGTCGCACCAGTCCTTCTGTCCTCATGTTGGCAGAGA |
| RPL30_NM_000989_r1_1 | /5Biosg/ACCATCTTCCTGCCTTAGCAGCGGGACGGCCCCCAACCAACAGCAGCCGCTAAGAT |
| (SEQ ID NO: 1029) | GGCCGGGGAACGAGAAAGGAAAGACTTCCCACAATGCAAAGCTCTTCACGGCAGAGCCGGAACT |
| RPL30_NM_000989_r1_2 | /5Biosg/GATCATCTTCAGAGTCTGCTTGTACCCCAGGACGTACTTCCCACTTTTCATAACGA |
| (SEQ ID NO: 1030) | GTTGGAGCCTAGAGTTGATCGACTCCAGCGACTTTTTCGTCTTCTTTGCGGCCACCATCTTCCT |
| RPL30_NM_000989_r1_3 | /5Biosg/GTAGTGATGGACACCAGTTTTAGCCAACATAGCATAGTACTCTATTTCAGATTTCC |
| (SEQ ID NO: 1031) | TCAAAGCTGGGCAGTTGTTAGCGAGAATGACCAATTTCGCTTTGCCTTGTCTGATCATCTTCAG |
| RPL30_NM_000989_r1_4 | /5Biosg/TTCTGGCATGCTTCTAATGATGTCAGAGTCACCTGGATCAATGATAGCCAGTGTGC |
| (SEQ ID NO: 1032) | ACACTCTGTAGTATTTTCCGCATGCTGTGCCCAGTTCAATATTATTGCCACTGTAGTGATGGAC |
| RPL30_NM_000989_r1_5 | /5Biosg/TAGATACAATGTTTTTAAAACAAGCAAATTTTATTAAAGGAAAATTTTGCAGGTTT |
| (SEQ ID NO: 1033) | AAGGTTTGCAGGTGAAATTTTGTAGGTGAAAAGGTTTACTTTTCACCAGTCTGTTCTGGCATGC |
| RPL31_NM_000993_r1_1 | /5Biosg/TTTCTTCTCGCCACCCTTCTTTGCGGGAGCCATTCTGCAGCGTCCAAGTTGGAAAG |
| (SEQ ID NO: 1034) | GAAGAGCGCGAAGGATTGTGGGAGAAGGAAAGCCGCAGTTGCAAGTACAACTTCCGGGTCGCCA |
| RPL31_NM_000993_r1_2 | /5Biosg/GAGGTGCACGCTTCTTGAAGCCCACTCCATGGATGCGCTTGTGAATGTTGATGGTG |
| (SEQ ID NO: 1035) | TATTCTCGGGTTACCACTTCGTTGATGGCAGAACGGCCCTTTTTCTTCTCGCCACCCTTCTTTG |
| RPL31_NM_000993_r1_3 | /5Biosg/TCCTTTGGCCCAGACAGCTTTGTTGAGCCTGGTGTCAATGCGCACATCTGGAGTTC |
| (SEQ ID NO: 1036) | CCATCTCCTTCATGGCAAATTTCCGAATCTCTTTGAGTGCCCGAGGTGCACGCTTCTTGAAGCC |
| RPL31_NM_000993_r1_4 | /5Biosg/ACATAGGTAACCAAAGTATATAGCTTATTTGGTGAATCTTCATCCTCATTACGTTT |
| (SEQ ID NO: 1037) | TCTGGACAGCCGCACACGGATTCGGTATGGCACATTCCTTATTCCTTTGGCCCAGACAGCTTTG |
| RPL31_NM_000993_r1_5 | /5Biosg/TTTTGAAGGCAATTTTATAACTTTATTTGATCTGACGATCAGCGATTAGTTCTCAT |
| (SEQ ID NO: 1038) | CCACATTGACTGTCTGTAGATTTTTGAAAGTGGTAACAGGTACATAGGTAACCAAAGTATATAG |
| RPL32_NM_000994_r1_1 | /5Biosg/TTCACAAGGGGTCTGAGGGCGGCCATGATGCCGAGAAGGAGATGGCTGCCACCTCC |
| (SEQ ID NO: 1039) | GTAGGCAGCGCCGAGGAAGAGAGAAGGGACGGTGGCGCGCAAGGGCTGATGGGTCGTAACCCCT |
| RPL32_NM_000994_r1_2 | /5Biosg/TCTTCTACGAACCCTGTTGTCAATGCCTCTGGGTTTCCGCCAGTTACGCTTAATTT |
| (SEQ ID NO: 1040) | TGACATATCGGTCTGACTGGTGCCGGATGAACTTCTTGGTTCTCTTTTTGACGATCTTGGGCTT |
| RPL32_NM_000994_r1_3 | /5Biosg/AGCACTTCCAGCTCCTTGACGTTGTGGACCAGGAACTTCCGGAAGCCACTGGGCAG |
| (SEQ ID NO: 1041) | CATGTGCTTTGTTTTTTTGTTGCTTCCATAACCAATGTTGGGCATCAAGATCTGGCCCTTGAAT |
| RPL32_NM_000994_r1_4 | /5Biosg/GGCATTGGGGTTGGTGACTCTGATGGCCAGTTGGGCAGCTCTTTCCACGATGGCTT |
| (SEQ ID NO: 1042) | TGCGGTTCTTGGAGGAAACATTGTGAGCGATCTCGGCACAGTAAGATTTGTTGCACATCAGCAG |
| RPL32_NM_000994_r1_5 | /5Biosg/GGCCAAGAAGCTGAAGACTTAAAATCAAGGAAGGAAGATGCCAGATGGCAGTTTTT |
| (SEQ ID NO: 1043) | ACATTTATTTAAACAGAAAACGTGCACATGAGCTGCCTACTCATTTTCTTCACTGCGCAGCCTG |
| RPL32_NM_000994_r1_6 | /5Biosg/TGTGCACTTGAGGCCACATTCCCCTGTTCAAGGACTGAGTGTCCTTTACAAATCCC |
| (SEQ ID NO: 1044) | CTCCAAATGGGAGATTCCAAAGGGGCTTAAGCAAAAGAACAATCTCTGTGGCAAACTAAGTTGG |
| RPL32_NM_000994_r1_7 | /5Biosg/ATGACTACTTGTGGCTTGGGAGCCACAAGCTTCTTCAAGTGTCTCAGAACCTACCT |
| (SEQ ID NO: 1045) | GGTGTGAGGGCCAAGTCTGTACCCCTCATACCCAGCCTCAACTGGAGATGACTAAGGCTAGTCT |
| RPL32_NM_000994_r1_8 | /5Biosg/CATCCCGTAAGAATCTGTGTAAGAAATTCATCTGGATATTTCCATGCATATTTTCT |
| (SEQ ID NO: 1046) | CAATTCTCACAAGCATCACATGGAATAACTTGTCACCTAACTTTACAAAAGCAAGGCTAAGAAT |
| RPL32_NM_000994_r1_9 | /5Biosg/GTGGGAGGGTTATAGGAGACTGAAAGTGCTTTTCCAGTTAACCGTGGTGGATTACC |
| (SEQ ID NO: 1047) | TGGAAGAGCAATTTGTACATCATCCTGTTCTTTTTGGACAGAAGTTACAGGATGCAATTTAGGC |
| RPL32_NM_000994_r1_10 | /5Biosg/AAAAAAAATCAGGACCACGTGTCACTAAATTCTGAGTACCAGTCAAGAGGCTCAAT |
| (SEQ ID NO: 1048) | TGTCACCAGTTAGGTCCCCGCCTTGGCAAACTGCTGTAACATTATACCTGAAGCAGCAGCTGGT |
| RPL32_NM_000994_r1_11 | /5Biosg/CTGTAGTCCCAGCTACTTGGAAGGCTGAGGTGGGAAGATCACCTGAGCCTGGGGAG |
| (SEQ ID NO: 1049) | GTCAAGGCTGTAGTCAGTGTGCCACTGCACTCCCAGCCTGGGTGAGAGCAAGACCCCGTCTCCA |
| RPL32_NM_000994_r1_12 | /5Biosg/GTACTTTGGGAGGCTGAAGCAGGATTGCTTGAGCTCAGGAGTTCGGGAGCCTAGGC |
| (SEQ ID NO: 1050) | AACATGGCTAGACCACCTCTACAAAAAAACTTCAAAAACTACCCAGGTTTGGAGGTGTGCATCT |
| RPL32_NM_000994_r1_13 | /5Biosg/TTTCTGCTAAGTTGACCAGGATGGTTACAGAAAAACATCCTGTAAGCATTTCTGTC |
| (SEQ ID NO: 1051) | TCATAAGTACCACATCCCATATCCCTCATGACCTATATACTACAGATGATGCCTGTAATCCCAG |
| RPL32_NM_000994_r1_14 | /5Biosg/TTTTTTTTTTGACCAGTTTGCATTATAAATATTTATGACTAGGTTTTGAACAGGAG |
| (SEQ ID NO: 1052) | ACAATCTGTAAGATTCCTGTCTAGACTAGAAGTAGAAAAGCTTTATTATACCCAGCGCAGCATT |
| RPL34_NM_000995_r1_1 | /5Biosg/GGGTTCGGGACAGCCTAGTTTTGTTAGAGGCTGTATTGTAGGAAAGCCTACGTCGG |
| (SEQ ID NO: 1053) | TATGTCAAACGCTGGACCATTCTGAGTGCCTGCAGACAACGTCCCCGGAAGAGGAAGAAAAAAG |
| RPL34_NM_000995_r1_2 | /5Biosg/CTTTAGGTCTTACAGCACGAACCCCTCGAAGTCTGCCTGGGCACACACCACATGCA |
| (SEQ ID NO: 1054) | GATTTTGGTGCTTTCCCAACCTTCTTGGTATAAAGGTAAACAATTCTATTACCAGGGGTTCGGG |
| RPL34_NM_000995_r1_3 | /5Biosg/TGCTCCTCGATAAGGAAAGCACGCTTGATCCTGTCACGAACACATTTAGCACACAT |
| (SEQ ID NO: 1055) | GGAACCACCATAGGCCCTGCTGACATGTTTCTTTGTTTTGGACAATCTCATAAGAACTTTAGGT |
| RPL34_NM_000995_r1_24 | /5Biosg/CTTTTTCTATTGGACAGCGTCTTTTCATTTTTATTACTCAAAAAAGTTTCATTTTT |
| (SEQ ID NO: 1056) | TTATTTAGCTTTCTGACTCTGTGCTTGTGCCTTCAACACTTTCACAACGATTTTCTGCTCCTCG |
| RPL34_NM_000995_r1_5 | /5Biosg/TCTCACCATAACAATCTCAAGATGCCAAGCAGACGTCACTGGATGCAAAACTGGAA |
| (SEQ ID NO: 1057) | AGAGATGCACACAACTGGCTCTCTCAAGCTGAGGTGAGGTAGCTCCAGCACACCAACTTTTTCT |
| RPL34_NM_000995_r1_6 | /5Biosg/AGTGATCATATACTGTAACTTGAGTAGTATCTAGGGATGTGCTGGTAGTATTTAAC |
| (SEQ ID NO: 1058) | CTCCAGCTCTCTGGGGGAAAACAGGATTTTGCAGCATTTGCTGAGGTGTAAATACTCTCACCAT |
| RPL34_NM_000995_r1_7 | /5Biosg/AAACTCTTTACAGAATCGAAGTATTAATAAGTACTTATAATAACAATCAAGTCATT |
| (SEQ ID NO: 1059) | ATCAAACATGTACCAGATATATATCAGAGCTCCTGGTACCAAGAGCATACTATATTAGTGATCA |
| RPL34_NM_000995_r1_8 | /5Biosg/CCCCTTTGCAAGATTTTTAATTCTTTTCCCTTCCATTCATACAGAGAACTGGTCAC |
| (SEQ ID NO: 1060) | ATAGAGAACTGGATTCAATAAAAGGCTCATTTTGGATTTTATAAAATCAAACCCTAAACTCTTT |
| RPL35_NM_007209_r1_1 | /5Biosg/AGGTCGTCCAGCTGTTTCAGCAGCTCCTCCTTCTTCTTCCCGCGAAGATCTCGAGC |
| (SEQ ID NO: 1061) | CTTGATCTTGGCCATTGCTGCACAAGCCGCCAACGCCGCCGCCCGCTCCGAGGGAAAGAGGAAG |
| RPL35_NM_007209_r1_2 | /5Biosg/TAATAACTGTGAGAACACGGGCAATGGATTTCCGGACGACTCGGATCTTAGAGAGC |
| (SEQ ID NO: 1062) | TTGGAGGCCGCACCGCCTGTCACTTTGGCGACGCGCAGCTGGGACAGCTCCACCTTCAGGTCGT |
| RPL35_NM_007209_r1_3 | /5Biosg/CCTCGTGCTTGTTGAGCCGGCGGCGCATGGCACGTGTCTTCTTAGGCCGCAGGTCC |
| (SEQ ID NO: 1063) | AGGGGCTTGTACTTCTTGCCCTTGTAGAATTTCCTGAGGTTTTCTTTCTGAGTCTGGTTAATAA |
| RPL35_NM_007209_r1_4 | /5Biosg/GCAGTCTCAGCCAGCTGTGCTTTATTGACAATGCGCCCCTCAGGCCTTGACCGCGT |
| (SEQ ID NO: 1064) | ACTTCCGCAGCGGGTACAGCCGCTCCTTCCGCTGCTGCTTCTTGGTCTTCAGGTTCTCCTCGTG |
| RPL36A_NM_021029_r1_1 | /5Biosg/AACCGCGAGGCAAACGCAAGTATATAGGAGGTTCCCGATCGCACTTCCTCATGGGA |
| (SEQ ID NO: 1065) | GTCGGTAGGAGCAATCATAGAGTGTAAGGCTCAGCGCAGCGCCCTCGGGCGGCTGAGAGGACTC |
| RPL36A_NM_021029_r1_2 | /5Biosg/CTGTGTCACTTTATGGGGTTGGTGCTTGCCACACTTCTTACAGAAAGTCCGGCGGG |
| (SEQ ID NO: 1066) | TTTTAGGGACGTTAACCATGCTTGCGTGAGCGCTATCGGCGCGGAAAGAAAGAAACCGCGAGGC |
| RPL36A_NM_021029_r1_3 | /5Biosg/TTTAGCCTTTTTCCGGAAAATCGGCTTAGTTTGCCCACCATAGCCACTCTGCTTCC |
| (SEQ ID NO: 1067) | TGTCATAACGCCGCTTTCCCTGGGCGTACAGAGAATCCTTGCCCTTCTTGTACTGTGTCACTTT |
| RPL36A_NM_021029_r1_4 | /5Biosg/TCTTATCTCCTCCCAGTTCAAAATGCTTGCATCTTTTAATAGCCAGCATTCTCTTA |
| (SEQ ID NO: 1068) | GATCTGCAGTTGGGCTCAACGCACTCAAGCCTTAGCACAATCTTCTTTGTAGTTTTAGCCTTTT |
| RPL36A_NM_021029_r1_5 | /5Biosg/CCCTCCCAAAAGATGAACAGCAAACAAATGAAGTGAACATAAACTCAAGATTTTAT |
| (SEQ ID NO: 1069) | TGTCTTCATAATAAAAGATGACACTTAGAACTGGATCACTTGGCCCTTTCTCTTCTTATCTCCT |
| RPL36A_NM_021029_r1_6 | /5Biosg/CAACATATGATGTGAACTCAACCAGTCAGCTTCAATGCAAAACAAGTAGTACCAGT |
| (SEQ ID NO: 1070) | AAGAGGCATAAATTTCCCCACAAGCGGAATTGTATTGATGGCTCTAGCTTATTCCCTCCCAAAA |
| RPL36A_NM_021029_r1_7 | /5Biosg/CCCTATTAGCCTGAAATGTGTCTACTCACATGATAACCAATAACCATTGCATAATG |
| (SEQ ID NO: 1071) | ACAAACTGCCTCATAAGGCCCCTAGTGATTGAAGTGCCAAATTAGAAAATTGCAACATATGATG |
| RPL36A_NM_021029_r1_8 | /5Biosg/GAAGAACAATGCCAAAATTCTTTATTAAATTAACTGTTATAACAAAGATCTGACAC |
| (SEQ ID NO: 1072) | TTAACTCTTAGCAAAGACATCTCATATTCACTATGAATGTGTTACTGACTTCTCCCTATTAGCC |
| RPL36_NM_033643_r1_1 | /5Biosg/CACTTTGTGGCCCTTGTTGAGGCCCACGGCCATAGGGTAGCGTAGGGCCATGGCTG |
| (SEQ ID NO: 1073) | CTGCTCTCCAGAGACGGCCGTGGCGGAAGGGCTGGCGCCGCGCGGAACTCCGGGATATCTACTC |
| RPL36_NM_033643_r1_2 | /5Biosg/CGGGGCAAAGCCACACACCTCCCGAATCATGTCCCGCACGAACTTGGTGTGTTTGG |
| (SEQ ID NO: 1074) | TCAGACGCCCGCGGCGTCGGCTGTGCCTGGGCTTGCTCACGTTCTTGGTCACTTTGTGGCCCTT |
| RPL36_NM_033643_r1_3 | /5Biosg/CCGCTTCCTCTTGGCGCGGATGTGCGTCCCCACCCTTTTCTTGATAAATTTGAGGG |
| (SEQ ID NO: 1075) | CCCGTTTGTCCTTGGAGACCTTCAGTAACTCCATGGCGCGCCGCTCGTACGGGGCAAAGCCACA |
| RPL36_NM_033643_r1_4 | /5Biosg/TTTTCTGTCAAGCTGTTCTTTATTTCAGGGAGAGGGCAGGGGAGGGGCTCAGTCTT |
| (SEQ ID NO: 1076) | TCTTGGCAGCAGCTTTCCTCATGGCGGCCAGTACGTTGCTCAGCTCCTCCCGCTTCCTCTTGGC |
| RPL37A_NM_000998_r1_1 | /5Biosg/GTATTTACCGACGATCCCGACTTTCTTGGTACGTTTGGCCATGTCGCCGCGACCTA |
| (SEQ ID NO: 1077) | GGTCCGAGCCCAGAAAGGAAGAGACGCGGTGCGCAGGCGCGGTATTAGGCGGACGAGCGGAAGT |
| RPL37A_NM_000998_r1_2 | /5Biosg/TCATCTTGGTTTTGCCACAGAAAGAGCAAGTGTACTTGGCGTGCTGGCTGATTTCA |
| (SEQ ID NO: 1078) | ATTTTCTTCACCATTTTCCGGAGGGAGGCCCCATAGCGGGTCCCGTATTTACCGACGATCCCGA |
| RPL37A_NM_000998_r1_3 | /5Biosg/GACTTTACCGTGACAGCGGAAGTGGTATTGTACGTCCAGGCACCGCCAGCCACTGT |
| (SEQ ID NO: 1079) | CTTCATGCAGGAACCACAGTGCCAGATCCCCACAGCTCGTCTCTTCATCTTGGTTTTGCCACAG |
| RPL37A_NM_000998_r1_4 | /5Biosg/TTTTGTTACATAAATTAACCCATTTATTATAGGCCAGTGATGTCTCAAAGAGTAGA |
| (SEQ ID NO: 1080) | GGAGCGTCTACTGGTCTTTCAACTCCTTCAGTCTTCTGATGGCGGACTTTACCGTGACAGCGGA |
| RPL37_NM_000997_r1_1 | /5Biosg/GATGACGTTCCCTTCGTCATCTCGCTTCTGCGGCCGAGACCAGAAAGACCGGAAGA |
| (SEQ ID NO: 1081) | GAAGGCACTTCCGCTATATCACGCTCAGAAGCTTCCGCCCAGGGAAGCACTTCCTGCGGGGCGC |
| RPL37_NM_000997_r1_2 | /5Biosg/CTTGCGCTTGGCAGGGTAGCCACATTTGCCACAGGTCGACTTCTGAAGGTGGTAGG |
| (SEQ ID NO: 1082) | CCTTAGAGCCACAGCGGCGGCACAACGTGTGCGTCTTATTGCGACGCTTTCCAAACGATGACGT |
| RPL37_NM_000997_r1_3 | /5Biosg/TTCCTTCACGGAATCCATGCCTGAATCTGCGGTATACAATTTTTAGGTGCCTCATT |
| (SEQ ID NO: 1083) | CGACCAGTTCCGGTGGTATTTCGTCTTTTAGCCTTGGCACTCCAGTTATACTTTCTCTTGCGCT |
| RPL37_NM_000997_r1_4 | /5Biosg/CAAAACCAGATATGTATTTTTTAAAACCAGAACATTTATTGCATGACTAATCGTTG |
| (SEQ ID NO: 1084) | ACATTCTTAAGATGAACTGGATGCTGCAACAGCTGCCCTCTTGGGTTTAGGTGTTGTTCCTTCA |
| RPL37_NM_000997_r1_5 | /5Biosg/AACATTCCAAAACAGTCACTTAACAAGTAAATCTGATATGAAGCTAGCCCAGTCCC |
| (SEQ ID NO: 1085) | TAAACCTACAGTATTTCACTGATACTACAAGCCTAATTGATTAAAAATACCTTACCAAAACCAG |
| RPL37_NM_000997_r1_6 | /5Biosg/GTGCTATTTTAATCTGCTATATTGTCTTCCAGTGCCCTCTGCTTCAAGGACTCCTG |
| (SEQ ID NO: 1086) | GAATTCTGCTTGTTTCTCATTGCCTTTAACCGTGTTACAAACCCAGTCCAAAAGTAAACATTCC |
| RPL37_NM_000997_r1_7 | /5Biosg/CCCCCTAGTCATGACAGCATAGCAGATGAACATGTTGCTAAAGGTAATTTAAACAT |
| (SEQ ID NO: 1087) | CATACTCTTTCAAATTTACTCAAACATCTAAAATACCCACCTATGCCACATGAGCTGTGCTATT |
| RPL37_NM_000997_r1_8 | /5Biosg/GTGAGCATTACAGATACTAGGATAAGATCATCTTTTGAAAAACAGAAGCCACCTAA |
| (SEQ ID NO: 1088) | ACTCCTACCCATACGTTTCCAGTGGTACTCCCAAGCTCTATGTGACTAATAATCATCCCCCTAG |
| RPL37_NM_000997_r1_9 | /5Biosg/AGCCCTACTTTTTCTCAAACCTATTTACATATTCTTAAGTTGACTCACACCTAGCA |
| (SEQ ID NO: 1089) | GGCTTTTTTCACTTAGCTAGCCACCTTACACACAGCCCACAAGTCAGGTGTGCCAAGTGAGCAT |
| RPL37_NM_000997_r1_10 | /5Biosg/GAGGGCTAAAAAAATTCGACCAAGTAGTCCCACATCATTGCCTTTAGTCTACAAAT |
| (SEQ ID NO: 1090) | CTCAGGGATTATACTTGATTTTCCTTTATTTCCTGCTCAATCTTTACTTGCACCCAAGCCCTAC |
| RPL37_NM_000997_r1_11 | /5Biosg/CATTTTAAAAAAACAAAAAAAACCCCCAACCCTGTCAATAAACCACGAAAACTAGG |
| (SEQ ID NO: 1091) | AAGGCACGACAGCAAGTTTCAGTGCTTTAACACAGAAACACCCAATTACCAAGTTGAGGGCTAA |
| RPL37_NM_000997_r1_12 | /5Biosg/TTAAATAGCATGACTTGGCTACATCACTATTTTATGTAGCTGTTCCAGCAATTCAT |
| (SEQ ID NO: 1092) | GTTCCCTTCAACTGCCCCTGCCCTCTCACTCAGCAGTCCAGTTGACTTTGTCCCTTCATTTTAA |
| RPL37_NM_000997_r1_13 | /5Biosg/CAATTAGCTAGCACATTATAAAGCCATTCCAGGTTACAAGTAAAAGTGATACCCTT |
| (SEQ ID NO: 1093) | CCAAGGCCAGGTTAAGAACCTCAGATGTTATTCTAAACACAGTGGAGAATTATAATTTAAATAG |
| RPL37_NM_000997_r1_14 | /5Biosg/TTTTGGGAGGAAGCCCAAGAGAGATTTAATCAGCAGGGTTTCTTTATAAGTGAATG |
| (SEQ ID NO: 1094) | TTCTGAAGCTGAGACCTGAAGGGTAAATTAGGAGTTAAAATACAAGATGAGAGTAGCAATTAGC |
| RPL38_NM_000999_r1_1 | /5Biosg/GGCGCGCTGGGCTCTGGCGCGGACCAGGACCTTTCTCACCCACGTATCACCCTAGA |
| (SEQ ID NO: 1095) | GACACTCACAGCAAGCAGCAACCGGGGAAAAGGACGAAAAAGAACGAGACTTCCGTTTCCGGGC |
| RPL38_NM_000999_r1_2 | /5Riosg/TTTTTCTTGATCTTGACAGATTTGGCATCCTTTCGTCGGGCTGTGAGCAGGAAGTC |
| (SEQ ID NO: 1096) | CTTGATTTCCTCAATTTTCCGAGGCATGGCGACGAGGCGCGCTGGGCTCTGGCGCGGACCAGGA |
| RPL38_NM_000999_r1_3 | /5Biosg/CTGCTTCAGTTTCTCTGCCTTCTCTTTGTCAGTGATGACCAGGGTGTAAAGGTATC |
| (SEQ ID NO: 1097) | TGCTGCATCGAACTTTAAACTTCACGTTGTCCTTATTTTTCTTGATCTTGACAGATTTGGCATC |
| RPL38_NM_000999_r1_4 | /5Biosg/TTTAGGATTTTTAGTATTTTAATATAATACAGTTCCAATCAGTGTGTCTGGTTCAT |
| (SEQ ID NO: 1098) | TTCAGTTCCTTCACTGCCAAACCGGGGGGCAGGGACTGCTTCAGTTTCTCTGCCTTCTCTTTGT |
| RPL39_NM_001000_r1_1 | /5Biosg/GGAATCGCTTAATCCTGAAAGTCTTGTGAGAAGACATGGCGAGCAGCGGAGTCAAG |
| (SEQ ID NO: 1099) | AACACACCACGATGGCGGAGAAAGGAAGAGGAGGGAAGCTGGCGGAAGAACGAGCTTAGAAGGC |
| RPL39_NM_001000_r1_2 | /5Biosg/CTTCTCCAATGTCTCCTTTTGGAGTTGTACCTGATTTTATTTCCAGTTTTCATCCG |
| (SEQ ID NO: 1100) | AATCCACTGGGGAATGGGACGATTTTGCTTTTGTTTCTTGGCCAGGAATCGCTTAATCCTGAAA |
| RPL39_NM_001000_r1_3 | /5Biosg/GTGACATTTTCAGCTTGATATGGTAACATGATCGTGACCTTCAGACAGCATAAATA |
| (SEQ ID NO: 1101) | TGTGTGCCATCTCATGTGCAATTCCTTATAGACCCAGCTTGGTTCTTCTCCAATGTCTCCTTTT |
| RPL39_NM_001000_r1_4 | /5Biosg/TTTAAAAAGAAAGGCCTTACATATTTATTACTGAATCCAGCCAACCAACGTGTTCA |
| (SEQ ID NO: 1102) | TAACAGATTCAGAGAGGAAAACACGTCGAAATCTCCAGATAGTGGTGACATTTTCAGCTTGATA |
| RPL3_NM_00967_r1_1 | /5Biosg/GCAGGAAGCCGAGGGACCCATGTCTGGGAGCGGAGAACTTTCTGTGAGACATCACG |
| (SEQ ID NO: 1103) | CCATCAAATCCCGCCGGTAGAGGCCGGTCGGCCTTACGGGTCCGCTATATAAAGCCAAATCTGG |
| RPL3_NM_00967_r1_2 | /5Biosg/GAGTCATGCCAGCCTTGTATCCCAGGAAGGCTGTGAGGTGGACCGGCTTGGACGGG |
| (SEQ ID NO: 1104) | TCATCCTTAGGGAAGCTCTTCACCTTCCCACGATGCCTGCTGCTGCGCTTCCGAGGCAGGAAGC |
| RPL3_NM_00967_r1_3 | /5Biosg/AGCCCACAATGCCCACAACCACCATGGGTGGTGTCTCTACAATGGTCACAGCCTCC |
| (SEQ ID NO: 1105) | ACCACCTCCTTCTTGTTCACCTTGGATCCCGGCCTGTCGACTTCCCGCACGATGTGAGTCATGC |
| RPL3_NM_00967_r1_4 | /5Biosg/CCTTCTTCTTAGATTTATGCCAATTCTTATAGAAACGCCTCTTGCATTCATCACTG |
| (SEQ ID NO: 1106) | ATGTGCTCAGCAAAGACAGTCTTGAAGGTCCGGAGGCCTCGAGGGGTTTCCACGTAGCCCACAA |
| RPL3_NM_00967_r1_5 | /5Biosg/TGTGGCTAATGACACGGATGACTTGGCAGTACTTCTTCATGCTGCTGAAGTCCTTC |
| (SEQ ID NO: 1107) | TCCAGCTGCTTCTTGCCATCCTCATCCTGCCATTTCTTGCAGTACTTGGTAAAGGCCTTCTTCT |
| RPL3_NM_00967_r1_6 | /5Biosg/GCTCAAGCCTCTCGCGGGCCCAGTCCAGCTTCTCGGCCACAGTGCCTCCGTTCACC |
| (SEQ ID NO: 1108) | TGGATCTCCATCAGGTGGGCCTTCTTCTGGCGCAGAGGAAGCAGGCGCATCTGGGTGTGGGCAA |
| RPL3_NM_00967_r1_7 | /5Biosg/CTTCTTGGTGTGCCAACGACTGGTGACCCCTTTGTAGCCTTTGCCCTTGGTCACCC |
| (SEQ ID NO: 1109) | CGATGACGTCGATCATCTCATCCTGCCCAAACACTTGGTTCACAGGTACCTGCTGCTCAAGCCT |
| RPL3_NM_00967_r1_8 | /5Biosg/GTGATGGTAGCCTTTCTGCCCAGCGCGTGCCACAGAGAAGGCTACACGAGCAGGAT |
| (SEQ ID NO: 1110) | GCCATGCCCCAATACAGGCCACCTTGCGCAGGCCTCGGTGGGTCTTGCGGGGCAGCTTCTTGGT |
| RPL3_NM_00967_r1_9 | /5Biosg/GCTCTTGTCAGATAGGTCATAGTCAGTGGAGGCATTGTTCTTGATCAGCTTGCCGT |
| (SEQ ID NO: 1111) | CCTTGATAAGGTAGCCCTGGCCAATCTTATAAATCTTCTTGTTGATCTCAGTGCGGTGATGGTA |
| RPL3_NM_00967_r1_10 | /5Biosg/GGACTTGCGGAGGGTGAGCACCCGCTTCTTGGTTCCCACCACACAGCCTTTCAGCA |
| (SEQ ID NO: 1112) | TGACAAAGTCATTGGTCACTTCACCATAGTGGACAAAGCCACCCAGAGGGTTGATGCTCTTGTC |
| RPL3_NM_00967_r1_11 | /5Biosg/TGCTTTCTTCTCCTCCATGGTCTGGAAGCGGCCATGGCCAAACTTGGAGGTGGTGT |
| (SEQ ID NO: 1113) | CAATGAACTTAAGGTCAATCTTCTCCAGAGCCCGCCGCTTCGTCTGCACCAGCAAGGACTTGCG |
| RPL3_NM_00967_r1_12 | /5Biosg/TTTGTCAGTGGAAAATAACTTTTATTGAGACCCCACCAACTGCAAAATCTGTTCCT |
| (SEQ ID NO: 1114) | GGCATTAAGCTCCTTCTTCCTTTGCAATTCGGTCTTTCTTCAGTGGTCCCATGAATGCTTTCTT |
| RPL41_NM_021104_r1_1 | /5Biosg/GCCTGCGCATTCGCTTCTTCCTCCACTTGGCTCTCATGGCGCAGAGGTTTCCAAAA |
| (SEQ ID NO: 1115) | AAATGGCGCTAAGGCCGAGAGAAAGGCGAAGTTCCGTCTACGGCTATTTAATGGAGCGCCGGGT |
| RPL41_NM_021104_r1_2 | /5Biosg/CTTGTACCAGCATCCCCAGCGTCTGGCATTCCATGTTTCTGCTCCTGTGGCCTCCA |
| (SEQ ID NO: 1116) | CGGTGCAACAAGCTAGCGGTTTACTTGGACCTCTGCCTCATCTTTCTTCTTTTGCGCTTCAGCC |
| RPL41_NM_021104_r1_3 | /5Biosg/AACATGGGCATTTTGTTTATGAGCAAGGTGGGTCTCAGAGGTGATCGGCGATCAGA |
| (SEQ ID NO: 1117) | GGGCGATGAAGTTCTAGATCCATTGAGACAAGCTCTAGACAGTAGCATGCAGTCCCACAACTTG |
| RPL41_NM_021104_r1_4 | /5Biosg/TTGATTTAATTCTTCAGCTAAAACAGCGGAAGAGGTGATTTATTATATGGTTGTTA |
| (SEQ ID NO: 1118) | CACTCGGCCACAAATAAACACAGAAATAGTCCAGAATGTCACAGGTCCAGGGCAGAGGACCAAC |
| RPL4_NM_000968_r1_1 | /5Biosg/CAGATGACTCCCCCTTTTCGGAGTACACCGATATCAGTGGGCGAGCACACGCCATG |
| (SEQ ID NO: 1119) | GCGGAGAGAGGAGACAGCCACGCTCCTCTCAGCCCGGCTGCTGCCACAGGAAAAGGAAGTGCTT |
| RPL4_NM_000968_r1_2 | /5Biosg/CTGCTAATTCACTGACAGCATAGGGCTGTCTGTTGTTTTTGCGCAAGTTGGTGTGA |
| (SEQ ID NO: 1120) | ACAAAGTTCACAATATCTGGTCGAATAGGAGCCTTGAATACAGCAGGCAAAGTGACATTTTTGC |
| RPL4_NM_000968_r1_3 | /5Biosg/CTCCACGACACATGTTTCCAAAAGCACCCTGGCCAGAGCGGTGAGTCCCACCACCT |
| (SEQ ID NO: 1121) | CGAACTCTGGGAATTCGAGCCACAGCTCTGCCAGTACCCCAAGACTCAGCACTAGTCTGATGAC |
| RPL4_NM_000968_r1_4 | /5Biosg/ACATGACCAGTGCTGGTAGGGCTGAGGCAGCCAGGGCAGAACAGATGGCGTATCGT |
| (SEQ ID NO: 1122) | TTTTGGGTTGTGTTCACTCTACGATGCCAACGGCGCCAGGTTTTGGTTGGTGCAAACATTCGGC |
| RPL4_NM_000968_r1_5 | /5Biosg/CATTCCAGGCTTTAAGTTTCTTAAGGAGCAAAACAGCTTCCTTGGTCTTCTTGTAG |
| (SEQ ID NO: 1123) | CCTTCAACTTTATCTTCAACTACCAAAGGAAGTTCAGGAACTTCCTCAATACGATGACCTTTAG |
| RPL4_NM_000968_r1_6 | /5Biosg/TGATGATACCATTATCCTCATTATAGATGATGCACGGGCCCCTGCGCTGGATACGG |
| (SEQ ID NO: 1124) | CGACGGTTTCTCATTTTGCCTTTGCCAGCTCTCATTCGCTGAGAGGCATAGACCTTTTTGATAT |
| RPL4_NM_000968_r1_7 | /5Biosg/TCCGGAAAGCACTTTCAGTCCAAATGCAGAAACGTCCCACATGCCCACCAGGAGCA |
| (SEQ ID NO: 1125) | AGCTTCAAAATGTTCAGCTTGCTTACATTAAGCAGAGTAATTCCAGGGATGTTTCTGAAGGCCT |
| RPL4_NM_000968_r1_8 | /5Biosg/GGATCTCTGGGCTTTTCAAGATTCTGCTAAGATCTGTATTAATCATCTTGTGCATG |
| (SEQ ID NO: 1126) | GGAAGATTGTAGTTACTCTTGAGGCAAGCGGCTTTACGCCAAGTGCCGTACAATTCATCTAACT |
| RPL4_NM_000968_r1_9 | /5Biosg/TGTTCCGGCGCATGGTCTTTGCATATGGGTTTAGCTTCAACATGATTCTCAAGTTT |
| (SEQ ID NO: 1127) | TTCAGTGGGTTCTTCTTTAGGACTCTGCGATGGATCTTCTTGCGTGGTGCTCGAAGGGCTCTTT |
| RPL4_NM_000968_r1_10 | /5Biosg/CTACCACAGGCTTCTTGCCTGCAACCGCCGCCTTCTCATCTGATTTGGCTTGTAGT |
| (SEQ ID NO: 1128) | GCCGCTGCTGCAGCAGCTGCCTTATCCACCCGGAGCTTGTGATTCCTGGCCTGGCGAAGAATGG |
| RPL4_NM_000968_r1_11 | /5Biosg/TAGGTTTCTTCTCTGCAGGCTTCTTTTCAGGGGCTGGTTTCTTGGTAGCTGCTGCC |
| (SEQ ID NO: 1129) | TTTTTTCCCACCAGAGGCTTCTTCTGCTTCTTAACACCAACACCAGCCTTCTTTCCTTTCTTAC |
| RPL4_NM_000968_r1_12 | /5Biosg/CATGTTTCTCACTGCCTGTATAATCAGGTCTTTATTCAAAAGAAGCTGTCCAAAAT |
| (SEQ ID NO: 1130) | GATTTGACCTTTATGGAATAATCAAATTTAAGAGTTTATGCAGCAGGCTTCTTCTCCTCTGTAG |
| RPL5_NM_000969_r1_1 | /5Biosg/CTTAAAGTAGGCCTTATTCTTAACAACTTTAACAAACCCCATCCTGCGGAACAGAG |
| (SEQ ID NO: 1131) | ACCGGCGTCCGCTGCTCGACAGAGACCTGCAGGCCCAGCGGCGCTAGGGGGTGGCAAAAGGGCC |
| RPL5_NM_000969_r1_2 | /5Biosg/TATCATCCTGTATTTGGGTGTGTTGTATTTATTTTTATCTTGTATCACCAAGCGTT |
| (SEQ ID NO: 1132) | TCCGAGCATAATAATCAGTTTTACCCTCTCGTCGTCTTCTAAATTTCACTTGGTATCTCTTAAA |
| RPL5_NM_000969_r1_3 | /5Biosg/CAACCTTCACACCATATTTTGGCAGTTCGTGTGCATACGCTGCGCAGACTATCATA |
| (SEQ ID NO: 1133) | TCCCCCTCTATACGGGCATAAGCAATCTGACAAATGATATCTCTGTTTGTCACACGAACTATCA |
| RPL5_NM_000969_r1_4 | /5Biosg/CATCACCAGTCACCTCCACTTGGCCTTCATAGATCTTGTCCATGCCAAACCTATTG |
| (SEQ ID NO: 1134) | AGAAGCCTGCGGGCCAGCAGCAGGCCAGTACAATATGCTGCAGGATAATTTGTCAGGCCAACCT |
| RPL5_NM_000969_r1_5 | /5Biosg/CAGCTCCCTTCAGGGCACCAAAAACTTTATTGCCAGTGGTAGTTCTGGCAAGGCCT |
| (SEQ ID NO: 1135) | GCATCCAAATAGCAGGTGAAGGCACCTGGCTGACCATCAATGCTTTCCACATTGTATTCATCAC |
| RPL5_NM_000969_r1_6 | /5Biosg/GCAACATTCTGGCCCATGATGTGCTTCCGATGTACTTCTGCATTAAATTCCTTGCT |
| (SEQ ID NO: 1136) | TTCAGAATCATAACCAGGCAATCGTTTGGTACTGTGAGGGATAGACAAGCCTCCATCCACAGCT |
| RPL5_NM_000969_r1_7 | /5Biosg/GCTTTCTTATACATCTCCTCCATCATGTCTGGAGTTACGCTGTTCTTTATGTATTG |
| (SEQ ID NO: 1137) | AGAGAACTGTTTCTTGTAAGCATCTTCATCTTCTTCCATTAAGTAGCGCATGTAATCTGCAACA |
| RPL5_NM_000969_r1_8 | /5Biosg/AGCTACCCGATCCTTCTTCTGAGCAAGGGACATTTTGGGACGGTTCCACCTCTTCT |
| (SEQ ID NO: 1138) | TTTTAACTTCTTTCTTGGGCTTCTTTTCATAGACTGGATTCTCTCGTATAGCAGCATGAGCTTT |
| RPL5_NM_000969_r1_9 | /5Biosg/TTTTTAGTTGCTGTTCATAAGTTTATTATCTATATCTGAAAAAATCATAGAAAATT |
| (SEQ ID NO: 1139) | GCTGGGTTTAGCTCTCAGCAGCCCGCTCCTGAGCTCTGAGGAAGCTTGCCTTCTTTTGAGCTAC |
| RPL6_NM_000970_r1_1 | /5Biosg/CATCAACCTTCTTGGCTTCGGGTTTCTTCTCTTTAGTATCTGGCTTCTCAACTTTT |
| (SEQ ID NO: 1140) | TCACCCGCCATCTTGCAAGATGGGAAAGAGAATTAAGGTCCCGGCTTCCGGTCTATAAGCAATC |
| RPL6_NM_000970_r1_2 | /5Biosg/ACATGGCAGATCGGGAATACCTGCCAATTCCTCTGACAAGGACAGGGTTGCGGCTG |
| (SEQ ID NO: 1141) | CAATGGGGCTTCCCCTTCTTGGGCTTTTTAGCTTTGAGGTTACCCTTTTTCACCTTGCCACCAG |
| RPL6_NM_000970_r1_3 | /5Biosg/CGCCGTTCTTGTCACCACCAACTGGTTTTGTAACAGTTGCGAGAACCTTCTCCTTC |
| (SEQ ID NO: 1142) | TTTTTCTTTTCAACCTTGGATTTAGCGGCTGAGTACTTCCTCTTGTACATGGCCTTTCTGGAAT |
| RPL6_NM_000970_r1_4 | /5Biosg/TGGCTCGCAGTTTTCTCACGTGCTGACTGAAGGGTTTTTTGCCGTGGCTCAACAGC |
| (SEQ ID NO: 1143) | TTTCGAGGCACATCTTCAGTAGGATAATATCTAGGCATTTTGCGAAGTTTAACCACCCGGGTAC |
| RPL6_NM_000970_r1_5 | /5Biosg/GATTGAGGACCAGAGGTCCAGTCACAAGTAATAAGCCACTAGCCAGCTGCTTCAGG |
| (SEQ ID NO: 1144) | AAAACCACCCTCTTGCCCCTGTGGCGTCCAGTGAGGATGATCAGAATGGTCCCGGGGGTAATGC |
| RPL6_NM_000970_r1_6 | /5Biosg/GCAGCTTCTTCTTCTTGAAGTAAGCATCAGTAAGATGTTTTGGGATTTTTACATTG |
| (SEQ ID NO: 1145) | CTGATATCGATTTTGGTTGAAGTGGCAATGACAAATTTCTGGTGTGTTCTTCGTAGAGGAACTC |
| RPL6_NM_000970_r1_7 | /5Biosg/CTTTGATTTTTGGTAAAATTTGTGAGTCCACAGCTTTCTGATCAATCTTGCGCTGC |
| (SEQ ID NO: 1146) | TCCGTAATCTCATATTTCTCTTTTTCTGTGTCGAAGATCTCACCTTCCTGGTGTCTGGGCTTCC |
| RPL6_NM_000970_r1_8 | /5Biosg/TTTTTTTGTAGTCAGCTATTTAATTAGGTTCTTAAGACATTTAGAACACCAATTTG |
| (SEQ ID NO: 1147) | TGAGGATAAATTCCATTCGTCAGAGCAAACACAGATCGCAGGTAGCCCTGGAGCTGAGGAATAG |
| RPL7A_NM_000972_r1_1 | /5Biosg/GGGATTCACCACTTTCTTAGCCTCCTGCTTCTTCACGACAGCTGGGGCCGGAGCCA |
| (SEQ ID NO: 1148) | CCTTCTTTCCCTTGGCCTTCTTTCCTTTCGGCATCTTGGGCGGCGGGAGGAGAGAGAAAGGAAA |
| RPL7A_NM_000972_r1_2 | /5Biosg/CTCTGCCGCTGCAACCTGATATAGCGGGGCCATTTCACAAAGCGGGTGAGGTCTCT |
| (SEQ ID NO: 1149) | TTTGGGCTGGATGTCCTGTCCAATGCCAAAATTCTTAGGCCTTTTCTCAAACAGGGGATTCACC |
| RPL7A_NM_000972_r1_3 | /5Biosg/GTCTGTACTTGTGGGCCAGCTTAAGCAGCTGAGTAGCTGTTTGGCGGTCCAGGGCC |
| (SEQ ID NO: 1150) | TGGGTGAACTGGTTAATCGCAGGAGGCACTTTCAGCCGCTTATAGAGGATGGCTCTCTGCCGCT |
| RPL7A_NM_000972_r1_4 | /5Biosg/AACTCCTGCTCGAAGGACAGGTGGTCTCTTCGTTGGGACGTCCCCTTTGCCAGCAG |
| (SEQ ID NO: 1151) | CCTTCTTCTCGGCCCGGGCCAACAGTCTCTGCTTCTTCTCTTGCTTTGTCTCTGGTCTGTACTT |
| RPL7A_NM_000972_r1_5 | /5Biosg/ATTTTACGACACAGGGCAGGCAAGAAGACAACCAGCTCGATGGGATCCACGTCGTG |
| (SEQ ID NO: 1152) | TGCAATCACCACCAGCTGAGCTTTCTTGTTCTCCACCAAGGTGGTGACGGTGTTAACTCCTGCT |
| RPL7A_NM_000972_r1_6 | /5Biosg/CGCCTTTGTCTTCCGAGTTCACCTGTGTGAAGGCGACAGTGGTGCAGGTCTTCCTG |
| (SEQ ID NO: 1153) | TGGACTAGACGTCCCAGTCTTGCCTTTCCCTTGATAATGCAGAAAGGGACCCCCATTTTACGAC |
| RPL7A_NM_000972_r1_7 | /5Biosg/GATACGAGCCACAGACTTAGGACCCAGGACATTGCCACCCCAGTGACGGCGGATCT |
| (SEQ ID NO: 1154) | CATCGTATCTGTCATTGTAATTGGTCCTGATAGCTTCCACCAGCTTAGCCAAAGCGCCTTTGTC |
| RPL7A_NM_000972_r1_8 | /5Biosg/GAAGGAAAATTTGTATTATTTCAATTATTTTTATGTACAGAAAACTCAACAGTGTA |
| (SEQ ID NO: 1155) | CATTTAACCCAGTTTAGTGGCAAGTTCTTTAGCCTTTGCCTTTTCGAGCTTGGCGATACGAGCC |
| RPL7_NM_000971_r1_1 | /5Biosg/AGGCGCTTGATCTTCAGCTCTGCGAAATTCCTTCGCTTTTTCTTAAGGGTTTCTGG |
| (SEQ ID NO: 1156) | CACAGCAGGAACCTCCTTCTTCTTCTCTTCTACACCCTCCATGGTTCCAGCCGGAAAAAGAGGA |
| RPL7_NM_000971_r1_2 | /5Biosg/CTCGCCATTCGAATTTCAGTTCTGTACATCTGCCTATATTCCTTGTGATAGTGCTT |
| (SEQ ID NO: 1157) | TGCTTTTTCATAGATAAGCTTCCTCCTTGCCTTTCGAAGCATCTTTTGGGCAAACTTCTTTCTC |
| RPL7_NM_000971_r1_3 | /5Biosg/CGAAGAAGCTGCAACACCTTTCGAACCTTTGGGCTCACTCCATTGATACCTCTGAT |
| (SEQ ID NO: 1158) | TCTGATGACAAACGCCAATTTGGGTTCTGCAGGTACATAGAAGTTGCCAGCTTTTCTTGCCATC |
| RPL7_NM_000971_r1_4 | /5Biosg/AGTTCATTTACTGACTTCAGATTGGGGTACCCCCATGCAATATATGGCTCTACAAT |
| (SEQ ID NO: 1159) | CCTCAGCATGTTAATCGAAGCCTTGTTGAGCTTCACAAAGGTTCCATTGAAGATTTGACGAAGG |
| RPL7_NM_000971_r1_5 | /5Biosg/TCATGAATCAAATCCTCCATGCAGATGATGCCGTATTTACCAAGAGATCGAGCAAT |
| (SEQ ID NO: 1160) | CAAAGCGTTATCTGTCAAAGCAATTCGCTTCTTATTGATTTTGCCATAACCACGCTTGTAGATT |
| RPL7_NM_000971_r1_6 | /5Biosg/GCATCTCCACCTTCTACAAAATGGGTGGTCTTTTTCTTCATTCCACCTCGTGGAGA |
| (SEQ ID NO: 1161) | AGACAATTTGAAGGGCCACAGGAAGTTATTTGCCTCTTTGAAGCGTTTTCCAACAGTATAGATC |
| RPL7_NM_000971_r1_7 | /5Biosg/TTTTATTTCAATTTGAGAGCAGGTACTGTTTATTAACCAACCAGCTTAGAAAAATA |
| (SEQ ID NO: 1162) | ATCATGGTAGACACCTTAGTTCATTCTTCTAATAAGCCTGTTGATCTGGTCCTCCCTGTTGCCA |
| RPL8_NM_000973_r1_1 | /5Biosg/CGCGCGGAACACAGACCCGGCGCCCTTCCTCTGTCCACGGATCACACGGCCCATGG |
| (SEQ ID NO: 1163) | CGACGGGTCCTGTTCACCAGCGCGGCCGAAAGAGGAAACACGGCGTCAGCGAGCGGCCTTATCT |
| RPL8_NM_000973_r1_2 | /5Biosg/GCGGCCCGGGTCGTGGATGATGTCCTTGACGATGCCCTTGATGTAGCCGTGCCGCT |
| (SEQ ID NO: 1164) | CAGCGAAATCCACGGCGCGCAGGCGCGCAGCGCCTTTACGGTGCTTCACGTGCGCGCGGAACAC |
| RPL8_NM_000973_r1_3 | /5Biosg/GCAATACACAAACTGGCCCGTGTGAATGCCCTCGGCGGCAATGAACAGCTCCGTCC |
| (SEQ ID NO: 1165) | GCTTCTTAAACCGATACGGATCCCGGAAGACCACCTTGGCGAGGGGCGCGCCGCGGCCCGGGTC |
| RPL8_NM_000973_r1_4 | /5Biosg/CAGCTTGCCACGGTCTCCAGGCTTCTCCTCCAGGCAGCACACGATTGTACCCTCAG |
| (SEQ ID NO: 1166) | GCATGGTGCCCACAGGGAGCACATTGCCAATGTTGAGCTGGGCCTTCTTGCCGCAATACACAAA |
| RPL8_NM_000973_r1_5 | /5Biosg/GTTGGCTGAGGAGATAACCTTCTTGGAGCCGGAGGGCAGCTTCACACGGGTCTTCT |
| (SEQ ID NO: 1167) | TGGTCTCAGGGTTGTGGGAGATAACGGTGGCATAGTTCCCTGATGCCCGGGCCAGCTTGCCACG |
| RPL8_NM_000973_r1_6 | /5Biosg/TCGTGGCCAGCAGTTCCTCTTTGCCTTATATTTGTGGTACGCCCGGCCAGCCTTCA |
| (SEQ ID NO: 1168) | AGATGGGTTTGTCAATTCGGCCACCTCCAGCCACCACACCAACCACAGCTCTGTTGGCTGAGGA |
| RPL8_NM_000973_r1_7 | /5Biosg/TTTGCGGCCAGCAGGGGCATCTCTGCGGATGGTGGAGGGCTTGCCGATGTGCTGGT |
| (SEQ ID NO: 1169) | GGTTGCCACCTCCAAAAGGATGCTCCACAGGATTCATGGCCACACCCCGTACTCGTGGCCAGCA |
| RPL8_NM_000973_r1_8 | /5Biosg/TTGGCATAAACACAAACTTTATTGAGGCCCTCAGCACTAGTTCTCTTTCTCCTGCA |
| (SEQ ID NO: 1170) | CAGTCTTGGTTCCCCGGAGACGTCCAGTCCGGCGGGCAGCAATGAGACCCACTTTGCGGCCAGC |
| RPL9_NM_000661_r1_1 | /5Biosg/TCAGAGTAATGTCGACATTTTCTGGAATGTCGACAGTCTGATTGCTGAGAATAGTC |
| (SEQ ID NO: 1171) | TTCATTCTCGCAGTAGACGCAGCAAAGAAAGAACGTCTGTCGTCATTACGTACTTGTATCGCGT |
| RPL9_NM_000661_r1_2 | /5Biosg/GGAGCCTCTTTTTTTTCTTTCCAAGAAGGCTGAGTTCAACATTGATGTGATTGAAG |
| (SEQ ID NO: 1172) | TCCCTCCGCAGGGTTCCTCTGGGGCCCTTCACGATAACTGTGCGTCCCTTCAGAGTAATGTCGA |
| RPL9_NM_000661_r1_3 | /5Biosg/TGTAACGGAAGCCCAGTGTAACACCCTTGATCATGTTCTGTACATGACTACAAATA |
| (SEQ ID NO: 1173) | GTCCGAACGGTAGCCAGTTCCTTTCTGTTACCCCACCATTTGTCAACCCGGAGCCTCTTTTTTT |
| RPL9_NM_000661_r1_4 | /5Biosg/CCCTGCGGATATATTTTTCACCCAAGAAATTTCGGATTTCAACAAGAGACCCATTC |
| (SEQ ID NO: 1174) | TCCTGGATAACAACGTTGATGGGGAAGTGAGCATACACAGACCTCATCTTGTAACGGAAGCCCA |
| RPL9_NM_000661_r1_5 | /5Biosg/TCAAAGCCGCTGAATTTGAAACAAGCTCAATGTCATTTCCTTCAAGGATTAATTCA |
| (SEQ ID NO: 1175) | TCTTTCTGGGCTTGAGATACTGAACAAGCAACACCTGGTCTCATCCGAACCCTGCGGATATATT |
| RPL9_NM_000661_r1_6 | /5Biosg/TTAGATCTTATTCATCAGCCTGCTGAACAGTTCCTTTTTCAGAGACATAGATACCA |
| (SEQ ID NO: 1176) | TCCAAAAATTTCCTGATATCCTTGTTTTTAACTGTTGTGGCTTGCTGAATCAAAGCCGCTGAAT |
| RPL9_NM_000661_r1_7 | /5Biosg/TTTAAGAAGAAGGTCCAAATCAATAGGTCTTTTATTGCATCATTTAAATATCACAA |
| (SEQ ID NO: 1177) | GTAGGTCTTAAGTGTCATCTGGCATCTTCTTTCTGTAGCCAGGTAACTCTTAGATCTTATTCAT |
| RPLP0_NM_001002_r1_1 | /5Biosg/GGACGCCTGGCGAGAGAAGGGCCTCGCGCCCGCGCGTGCCTTTTATAATGCGAACA |
| (SEQ ID NO: 1178) | AAGTAGCCAATCAGAAACCGCGGATAGCGCTCCTGTCTATTGGCTGCGCCATCGCCCGTCAGAC |
| RPLP0_NM_001002_r1_2 | /5Biosg/TGATCTTAAGGAAGTAGTTGGACTTCCAGGTCGCCCTGTCTTCCCTGGGCATCACG |
| (SEQ ID NO: 1179) | GCGGTGCGTCAGGGATTGCCACGCAGGGTTTAAAGACGATGTCACTTCCACGAGGACGCCTGGC |
| RPLP0_NM_001002_r1_3 | /5Biosg/AGCACCACAGCCTTCCCGCGAAGGGACATGCGGATCTGCTGCATCTGCTTGGAGCC |
| (SEQ ID NO: 1180) | CACATTGTCTGCTCCCACAATGAAACATTTCGGATAATCATCCAATAGTTGGATGATCTTAAGG |
| RPLP0_NM_001000_r1_4 | /5Biosg/GAACACAAAGCCCACATTCCCCCGGATATGAGGCAGCAGTTTCTCCAGAGCTGGGT |
| (SEQ ID NO: 1181) | TGTTTTCCAGGTGCCCTCGGATGGCCTTGCGCATCATGGTGTTCTTGCCCATCAGCACCACAGC |
| RPLP0_NM_001002_r1_5 | /5Biosg/TCTGGGCTGGCACAGTGACTTCACATGGGGCAATGGCACCAGCACGGGCAGCAGCT |
| (SEQ ID NO: 1182) | GGCACCTTATTGGCCAGCAACATGTCCCTGATCTCAGTGAGGTCCTCCTTGGTGAACACAAAGC |
| RPLP0_NM_001002_r1_6 | /5Biosg/GTCTTGATCAGCTGCACATCACTCAGGATTTCAATGGTGCCCCTGGAGATTTTAGT |
| (SEQ ID NO: 1183) | GGTGATACCTAAAGCCTGGAAAAAGGAGGTCTTCTCGGGCCCGAGACCAGTGTTCTGGGCTGGC |
| RPLP0_NM_001002_r1_7 | /5Biosg/GTAGATGCTGCCATTGTCGAACACCTGCTGGATGACCAGCCCAAAGGAGAAGGGGG |
| (SEQ ID NO: 1184) | AGATGTTGAGCATGTTCACCAGCGTGGCTTCGCTGGCTCCCACTTTGTCTCCAGTCTTGATCAG |
| RPLP0_NM_001002_r1_8 | /5Biosg/ATGCAACAGTTGGGTAGCCAATCTGCAGACAGACACTGGCAACATTGCGGACACCC |
| (SEQ ID NO: 1185) | TCCAGGAAGCGAGAATGCAGAGTTTCCTCTGTGATATCAAGCACTTCAGGGTTGTAGATGCTGC |
| RPLP0_NM_001002_r1_9 | /5Biosg/GGATCAGCCAAGAAGGCCTTGACCTTTTCAGCAAGTGGGAAGGTGTAATCCGTCTC |
| (SEQ ID NO: 1186) | CACAGACAAGGCCAGGACTCGTTTGTACCCGTTGATGATAGAATGGGGTACTGATGCAACAGTT |
| RPLP0_NM_001002_r1_10 | /5Biosg/GTCCGACTCCTCCGACTCTTCCTTGGCTTCAACCTTAGCTGGGGCTGCAGCAGCAG |
| (SEQ ID NO: 1187) | CAGGAGCAGCTGTGGTGGCAGCAGCCACAGGGGCAGCAGCCACAAAGGCAGATGGATCAGCCAA |
| RPLP0_NM_001002_r1_11 | /5Biosg/TTTTTTACTTTTTAAAGAAGTAAGCCTTTATTTCCTTGTTTTGCAAATAAAACTGG |
| (SEQ ID NO: 1188) | CTAAGTTGGTTGCTTTTTGGTGATTAGTCAAAGAGACCAAATCCCATATCCTCGTCCGACTCCT |
| RPLP1_NM_001003_r1_1 | /5Biosg/GAGTGTAGGGCTGGCGCTGCCGGACGCGGTGCTAGTCGCCGGATGAAGTGAGGGCC |
| (SEQ ID NO: 1189) | TCACCCCAACGCAGCCTTAGCTTCCTCGGAAGGACCGAGCACCTTGGCGGCAGCTGAGGAAAGG |
| RPLP1_NM_001003_r1_2 | /5Biosg/GCATTGATCTTATCCTCCGTGACTGTCACCTCATCGTCGTGCAGAATGAGGGCCGA |
| (SEQ ID NO: 1190) | GTAGATGCAGGCGAGCTCGGAGACAGAGGCCATGGCGCGGGCGAGTGTAGGGCTGGCGCTGCCG |
| RPLP1_NM_001003_r1_3 | /5Biosg/CATTGCAGATGAGGCTCCCAATGTTGACGTTGGCCAGGGCCTTTGCAAACAAGCCA |
| (SEQ ID NO: 1191) | GGCCAAAAAGGCTCAACATTTACACCGGCTGCTTTAATGAGGGCATTGATCTTATCCTCCGTGA |
| RPLP1_NM_001003_r1_4 | /5Biosg/TTCCACTTTCTTCTCCTCAGCTGGAGCAGCAGCAGTGGAGGGGGCAGGACCTCCTG |
| (SEQ ID NO: 1192) | CTGGTGCAGCACCAGCTGCTGGAGCAGGTCCACCGGCCCCTACATTGCAGATGAGGCTCCCAAT |
| RPLP1_NM_001003_r1_5 | /5Biosg/AAAGTTCAGCTTTTTATTGAACATGTTATAAAAGAGGTTTAGTCAAAAAGACCAAA |
| (SEQ ID NO: 1193) | GCCCATGTCATCATCAGACTCCTCGGATTCTTCTTTCTTTGCTTCCACTTTCTTCTCCTCAGCT |
| RPLP2_NM_01004_r1_1 | /5Biosg/GGCGACGTAGCGCATCGCGGCGGCGTCTGCGGCGGAGGCGGCGGAGAAGTCTCACG |
| (SEQ ID NO: 1194) | CGTGCGACCTCGGTGGCGACAGGGAGGAAAAGGAAGGCGCCGACGCAAGAGGCGGGGTTAAACC |
| RPLP2_NM_01004_r1_2 | /5Biosg/CGTCGTCCGCCTCGATACCCACGCTGTCCAAGATCTTCTTGATGTCCTTGGCGCTG |
| (SEQ ID NO: 1195) | GGGGAGGAGTTGCCCCCTAGGGCAGCCAGCAGGTAGGAGGCGACGTAGCGCATCGCGGCGGCGT |
| RPLP2_NM_01004_r1_3 | /5Biosg/CAGCAGGTACACTGGCAAGCTTGCCAATACCCTGGGCAATGACGTCTTCAATGTTT |
| (SEQ ID NO: 1196) | TTTCCATTCAGCTCACTGATAACCTTGTTGAGCCGGTCGTCGTCCGCCTCGATACCCACGCTGT |
| RPLP2_NM_01004_r1_4 | /5Biosg/TTCTTCTCATCTTTCTTCTCCTCTGCTGCAGCAGGGGCAGAACCAGCAGCAGGGGC |
| (SEQ ID NO: 1197) | TGCAGAGCCTGGGGCAGCAGAGACGGCTACAGCCCCACCAGCAGGTACACTGGCAAGCTTGCCA |
| RPLP2_NM_01004_r1_5 | /5Biosg/TTGAGATGTGTAAAAAGGCTTTATTTGCAGGGGAGCAGGAATTTAATCAAAAAGGC |
| (SEQ ID NO: 1198) | CAAATCCCATGTCATCATCTGACTCTTCAGACTCCTCCTTCTTCTCATCTTTCTTCTCCTCTGC |
| RPS10_NM_001014_r1_1 | /5Biosg/ATCCGGTTCTTCTTAGGCATCAACATCTCTGCGGCTGCAGGGTCCGGTACCGGGGC |
| (SEQ ID NO: 1199) | TGGAAAGGAAGGAGCATGCGCGGTGCTGCGTCTCTTCCGGGCTGGCGTGGACCCGCCCCCCGCC |
| RPS10_NM_001014_r1_2 | /5Biosg/TGAAGGTTGGGCACATTCTTGTCTGCCAGCTCCGGGTGCTTAGGCATGTGGACATC |
| (SEQ ID NO: 1200) | CTTCTTGGCCACCATGACTCCCTCCTTAAAAAGGAGTTCATAAATGGCAATCCGGTTCTTCTTA |
| RPS10_NM_001014_r1_3 | /5Biosg/GATACTGGATACCCTCATTGGTAAGGTACCAGTAGAAATGTCTCCAGGCAAACTGT |
| (SEQ ID NO: 1201) | TCCTTCACGTAGCCTCGGGACTTGAGAGACTGCATGGCCTTCATGACATGAAGGTTGGGCACAT |
| RPS10_NM_001014_r1_4 | /5Biosg/GTCGCTCACCCTCCAGACCTTTAGGCCGAGGCCTGCCAGTCTCTGGACGGCTACGG |
| (SEQ ID NO: 1202) | CGTAGGGTGGCAGGCACAATCTCCGGGGGCAGATGAAGGTAATCACGGAGATACTGGATACCCT |
| RPS10_NM_001014_r1_5 | /5Biosg/GGTTGCTGACCCAGCCCCAGCCTCGGCTTTCTTGTCGGCACCAGGTGGCACAGCAC |
| (SEQ ID NO: 1203) | TCCGTCTGTAGGTATCTCTGTCAGCTTCCCCTCTTGTGAGTCTCGCAGGTCGCTCACCCTCCAG |
| RPS10_NM_001014_r1_6 | /5Biosg/TAAGGTTTTTTGGCTGTAAGTTTATTCAATGCAAAAGAATCCTCTCCAATTTTACT |
| (SEQ ID NO: 1204) | GAGGTGGCTGACCACGTCCACGACCAAATCCGCCTCTAAACTGGAATTCGGTTGCTGACCCAGC |
| RPS11_NM_001015_r1_1 | /5Biosg/AGGCACGCTCAGTCTGAATGTCCGCCATCTTCCCGGCCGCCTGAAAAAAAGAAAGG |
| (SEQ ID NO: 1205) | GGCAGCAGCGTCCGGGTTTCCTTATCGATTACGCAGGGGCTGGAGAGGAAGTGACGTAAGGAGA |
| RPS11_NM_001015_r1_2 | /5Biosg/TGAAGCCCAGACCGATGTTCTTGTAGTACCGCGGGAGCTTCTCCTTGCCAGTTTCT |
| (SEQ ID NO: 1206) | CCCAGCAGGACCCTCTTCTTGTTTTGAAAGATGGTCGGCTGCTTTTGGTAGGCACGCTCAGTCT |
| RPS11_NM_001015_r1_3 | /5Biosg/TCTTGGTCACCACGCCAGAGAGGATCCGCCCTCGAATGGACACATTACCAGTGAAG |
| (SEQ ID NO: 1207) | GGGCATTTCTTGTCAATGTAGGTGCCCTCAATAGCCTCCTTGGGTGTCTTGAAGCCCAGACCGA |
| RPS11_NM_001015_r1_4 | /5Biosg/GGGGACAGGTGTACAGACATGTTCTTGTGGCGCTTCTCGAAGCGGTTGTACTTGCG |
| (SEQ ID NO: 1208) | GATGTAGTGCAGATAGTCTCGGCGGATGACAATGGTCCTCTGCATCTTCATCTTGGTCACCACG |
| RPS11_NM_001015_r1_5 | /5Biosg/CCGGCAGCCTTGGTGACCTTGAGCACGTTGAAGCGCACTGTCTTGCTCAGAGGCCG |
| (SEQ ID NO: 1209) | GCACTCGCCCACTGTGACGATGTCACCGATCTGGACGTCCCTGAAGCAGGGGGACAGGTGTACA |
| RPS11_NM_001015_r1_6 | /5Biosg/CGCGGAAGATCCCAAGTCTGGCCTGGGAATGAGAAAATAACTTTATTTCATTGTGG |
| (SEQ ID NO: 1210) | GGAGCGGGCCGATGTCCAGCCTCAGAACTTCTGGAACTGCTTCTTGGTGCCGGCAGCCTTGGTG |
| RPS12_NM_001016_r1_1 | /5Biosg/TCCATTACACCTCCAGCAGCAATGCCTTCCTCGGCCATGGCGGTGGGTTACGGGTG |
| (SEQ ID NO: 1211) | AAGTTGAATCTTGAACGCACCCAAGCCTCCGCCTCCGCGCGACTCGGCGGCGGCAGGGAAAGAG |
| RPS12_NM_001016_r1_2 | /5Biosg/CGCTTGTCTAAGGCTTTGGCAGCTTCGCGAATTCCACGTGCTAGGCCATCGTGGAT |
| (SEQ ID NO: 1212) | GAGGGCAGTCTTCAGAACCTCTTGTAAAGCAGTATTAACGTCCATTACACCTCCAGCAGCAATG |
| RPS12_NM_001016_r1_3 | /5Biosg/AATTAGGTTGATTTGGTGTTCAGCACAAAGGGCCTCCACCAACTTGACATACATAG |
| (SEQ ID NO: 1213) | GCTCATCACAGTTGGATGCAAGCACACAAAGATGGGCTTGGCGCTTGTCTAAGGCTTTGGCAGC |
| RPS12_NM_001016_r1_4 | /5Biosg/TACACAACTGCAACCAACCACTTTACGGGGTTTCCCCTCTCTGTCAATTTTACAAA |
| (SEQ ID NO: 1214) | GGCCTACCCATTCTCCTAGTTTCTTGTTGTCATCAACCTTAATTAGGTTGATTTGGTGTTCAGC |
| RPS12_NM_001016_r1_5 | /5Biosg/TTTGTGAGCCAAAGATTTATTTCTTCATTTCTTGCATTTGAAATACTCTTCAATGA |
| (SEQ ID NO: 1215) | CATCCTTGGCCTGAGACTCCTTGCCATAGTCCTTAACTACTACACAACTGCAACCAACCACTTT |
| RPS13_NM_001017_r1_1 | /5Biosg/ATGTCAACTTCAACCAAGTGGGGACGCTGCGTCGATAGGGTAAAGCCGACTGGGAC |
| (SEQ ID NO: 1216) | AGGCCCTTCCCGGGAGCATGCATGCGACCCATGATGGCGGCGATCAGGCAACGAAAGGAGAGCG |
| RPS13_NM_001017_r1_2 | /5Biosg/GTACTTGTGCAACACCATGTGAATCTCTCAGGATTACACCGATCTGTGAAGGAGTA |
| (SEQ ID NO: 1217) | AGGCCCTTCTTGGCCAGTTTGTAAATCTGCTCCTTCACGTCGTCAGATGTCAACTTCAACCAAG |
| RPS13_NM_001017_r1_3 | /5Biosg/ACAGCAACTGCTTTCTTAATTAAATGGTAGAGATCTTCAGGAAGATCAGGAGCAAG |
| (SEQ ID NO: 1218) | TCCCTTAGACTTAAGAATTCTTAAAATTTTATTGCCTGTCACAAAACGTACTTGTGCAACACCA |
| RPS13_NM_001017_r1_4 | /5Biosg/TTGGTCTTATAATATCGAGCCAAACGGTGAATCCGGCTCTCTATTAGAATCAGACG |
| (SEQ ID NO: 1219) | GAATTTAGCATCCTTATCCTTTCTGTTCCTCTCAAGATGCTTTCGAACAGCAACTGCTTTCTTA |
| RPS13_NM_001017_r1_5 | /5Biosg/TAGTTAAACAATCATTTTATTGCTTGAGTACACAGACAAATTTATGCGACCAGGGC |
| (SEQ ID NO: 1220) | AGAGGCTGTAGATGATTCATATTTCCAATTGGGAGGGAGGACTCGCTTGGTCTTATAATATCGA |
| RPS14_NM_005617_r1_1 | /5Biosg/CCACCTGAGGTCCGAGGCTGATGACCTGTTCTTCCTTCTTTTCCTTCCCCTTTCGA |
| (SEQ ID NO: 1221) | GGTGCCATTTCTGCACGTCGTCTCCAGACTCCACACCGGAAAGAGAGAGTGGGAGGGGGCGGAG |
| RPS14_NM_005617_r1_2 | /5Biosg/CCACCAGTCACACGGCAGATGGTTTCCTTGCCAGAAAGATCAGTGACATGGACAAA |
| (SEQ ID NO: 1222) | AGTGTCATTGAAGGATGCAAAGATATGGCAGACACCAAATACATTCTCTCCTTCAGCCACCTGA |
| RPS14_NM_005617_r1_3 | /5Biosg/TTTGATGTGTAGGGCGGTGATACCCAGCTCCTTGCACCTCTGGGCCACATCCTGGG |
| (SEQ ID NO: 1223) | CAGCCAACATAGCAGCATATGGTGAGGATTCATCTCGGTCTGCCTTTACCTTCATCCCACCAGT |
| RPS14_NM_005617_r1_4 | /5Biosg/GGGTGACATCCTCAATCCGCCCGATCTTCATACCCGAGCGGGCAAGGGCTCTGAGG |
| (SEQ ID NO: 1224) | GCCGACTGGGCCCCAGGTCCAGGGGTCTTGGTCCTATTTCCTCCTGTGGCCCGGAGTTTGATGT |
| RPS14_NM_005617_r1_5 | /5Biosg/TGAAACAGTTTACATGAAGGCAATTTATTAACAGAAAATATTTTGAGGAATCTTGT |
| (SEQ ID NO: 1225) | TCACAGACGGCGACCACGGCGACCCCCCTTCCTGCGAGTGCTGTCAGAGGGGATGGGGGTGACA |
| RPS15A_NM_001019_r1_1 | /5Biosg/TGCCAGGACATTCATGCGCACCATTGTGGCTTAGATTGCAGGATGGCGCCGATGGC |
| (SEQ ID NO: 1226) | AGACGGATGAAATTGGAGCTCTCAGAGAGTGCTACTCACCGGCGCGGAAAGATGGCGGAAAGAG |
| RPS15A_NM_001019_r1_2 | /5Biosg/GCTTCATCATCACAGTGAGAAACCGGACGATGACTTTGGAGCACGGCCTAATAAGC |
| (SEQ ID NO: 1227) | ACCTGGCGTTTGCCTCTCTTTTCGGCATTGTTGATACTCTTGAGAGCATCTGCCAGGACATTCA |
| RPS15A_NM_001019_r1_3 | /5Biosg/AATCTGGGGCTGATCACCCCACACTTGTTTAGCCTGCCTGTGAGGTTCACAACAAT |
| (SEQ ID NO: 1228) | TTTCCCAGCTCTGTGGTCATCAATGATTTCAAATTCGCCAATGTAACCATGCTTCATCATCACA |
| RPS15A_NM_001019_r1_4 | /5Biosg/TTCATGGTCCATGATGCCAGCTGAGGTTGTCAGTACAATGAAACCAAACTGGCGGG |
| (SEQ ID NO: 1229) | ATGGAAGCAGATTATTCTGCCATTTTTCCAGGTCTTTGAGTTGCACGTCAAATCTGGGGCTGAT |
| RPS15A_NM_001019_r1_5 | /5Biosg/TTGGAAGCACCAGAGTCCATGAGGCATTTTATTTGTAAATATATGTATTACATCCC |
| (SEQ ID NO: 1230) | TAGAAAAAGAATCCCAGGATTTTCCCTCCTGTGTGTTTTCGTCTTGCTTCTTCATGGTCCATGA |
| RPS15_NM_001018_r1_1 | /5Biosg/CGCCGCGGTAGGTGAACTTGCGCAAGGTCCGCTTCTTCTTCTGCTCTACTTCTGCC |
| (SEQ ID NO: 1231) | ATCTTGCCGGATCCTCAGAAGAGATCGCTTTGGTCCGCGCCTGCGCAGTTATCGCGAGACTGCC |
| RPS15_NM_001018_r1_2 | /5Biosg/TGCTGCTTCCGCCGCAGGCCCCGGTTCAGCCGCCGCCGCTGGCGCGCACTGTACAG |
| (SEQ ID NO: 1232) | CTGCATCAGCTGCTCGTAGGACATGTCCAGCAGCTGGTCGAGGTCCACGCCGCGGTAGGTGAAC |
| RPS15_NM_001013_r1_3 | /5Biosg/TCGGGTAGGATGATCATGTCCCGCAGGTGCGTCTTCACCACTTCCGGCTTCTCCAT |
| (SEQ ID NO: 1233) | GGGCGGCGCCTCCTTCTTGGCCTTGCGCAGGCGCTTCAGCAGGGAGTGCTGCTTCCGCCGCAGG |
| RPS15_NM_001018_r1_4 | /5Biosg/GGTGATGGAGAACTCGCCCAGGTAGTGGCCGATCATCTCGGGCTTGATCTCCACCT |
| (SEQ ID NO: 1234) | GGTTGAAGGTCTTGCCGTTGTAGACGCCCACCATGCTGCCCACCATCTCGGGTAGGATGATCAT |
| RPS15_NM_001018_r1_5 | /5Biosg/GGAGTCATGTGCGCCTTTATTAGCTGAGCCATTACTTGAGAGGGATGAAGCGGGAG |
| (SEQ ID NO: 1235) | GAGTGGGTGGCCCCGATGCCGGGCCGGCCATGCTTTACGGGCTTGTAGGTGATGGAGAACTCGC |
| RPS16_NM_001020_r1_1 | /5Biosg/AGACCTGCACAGACTGCAGCGGGCCCTTGGACGGCATGGCTCCGAGCGTGGACTAG |
| (SEQ ID NO: 1236) | ACAACCTCACCGCGCGGCGCCGCAACCGGAAAAGGAAAGCTAGGGGCCACCCTGGCCGCTTTTC |
| RPS16_NM_001020_r1_2 | /5Biosg/TCATCTTCTTCCGGATTTGGCGGACCTGTTGGTGCTGAGCATAAGAGGTCTTCCGT |
| (SEQ ID NO: 1237) | TTGATGAGACCATTGCCGCGTTTGCAGTGCGCCACAGCTGTCGCTGTCTTCTTGCGTCCGAAGA |
| RPS16_NM_001020_r1_3 | /5Biosg/GCTTTGGAGATGGACTGACGGATAGCATAAATCTGGGCCACGTGACCACCACCCTT |
| (SEQ ID NO: 1238) | TACACGGACACGGATGTCTACACCAGCAAATCGCTCCTTGCCGAGAAGCAGAACTGGCTCCAGC |
| RPS16_NM_001020_r1_4 | /5Biosg/TTTGGACTCGCAGCGACGAGGGTCAGCTACCAGCAGGGTCCGGTCATACTGGATGA |
| (SEQ ID NO: 1239) | GGATGTCTTTGATCTCCTTCTTGGAAGCCTCATCCACATATTTCTGGTAATAGGCCACCAGGGC |
| RPS16_NM_001020_r1_5 | /5Biosg/TTCTTGAAACTTTAAAATCCCTCAAAAACTGTTTATTATACAAGTGAGTTTTGAGT |
| (SEQ ID NO: 1240) | CACGATGGGCTTATCGGTAGGATTTCTGGTAGCGAGCGCGGGCACCAGGGCCTCCAAACTTTTT |
| RPS17_NM_001021_r1_1 | /5Biosg/TCGTGTGGAAGTCGTTGCCCAGGCGCGTGTAGTACTTTTCTATGATGACCCGGGCC |
| (SEQ ID NO: 1241) | GCCTTCTTCACGGTTTTGGTGCGAACGCGGCCCATGTTGGCGGGTCCTTGGTAAAAGAGGAAAC |
| RPS17_NM_001021_r1_2 | /5Biosg/GAATTCGCTTCATCAGATGCGTGACATAACCTGCTATCTTGTTGCGGAGCTTTTTG |
| (SEQ ID NO: 1242) | CTGGGGATAATGGCGATCTCCTCGCACACGCGCTTGTTCGTGTGGAAGTCGTTGCCCAGGCGCG |
| RPS17_NM_001021_r1_3 | /5Biosg/ATCCAAGGCTGAGACCTCAGGAACATAATTGTCTCTCCTTTCTCTCTCCTCCTCCT |
| (SEQ ID NO: 1243) | GCAGCTTGATGGAGATACCTCTTACTGGGCCTCTCTGAATTCGCTTCATCAGATGCGTGACATA |
| RPS17_NM_001021_r1_4 | /5Biosg/GTAGGCTGAGTGACCTGAAGGTTGGACAGACTGCCGAAGTCCAAAAGCTTCAGCAT |
| (SEQ ID NO: 1244) | TTCCTTAGTGTCAGGATCTACTTCAATAATCTCCTGATCCAAGGCTGAGACCTCAGGAACATAA |
| RPS17_NM_001021_r1_5 | /5Biosg/TTTTTGCTGTTGTCCCAGATTTATTGAAAATAATACAGCACTACAGTAAAAATTCA |
| (SEQ ID NO: 1245) | AACAGGTCCCCGAGGCGTTTTGAAATTCATCCCAACTGTAGGCTGAGTGACCTGAAGGTTGGAC |
| RPS18_NM_022551_r1_1 | /5Biosg/TTTCCGCCGCCCATCGATGTTGGTGTTGAGTACTCGCAAAATATGCTGGAACTTTT |
| (SEQ ID NO: 1246) | CAGGGATCACTAGAGACATGGCTGCAGCACAAGCGGCGGCGTGTAGGCCTCCTGTGGAAGAGAG |
| RPS18_NM_022551_r1_2 | /5Biosg/CAGTGAGTTCTCCCGCCCTCTTGGTGAGGTCAATGTCTGCTTTCCTCAACACCACA |
| (SEQ ID NO: 1247) | TGAGCATATCTTCGGCCCACACCCTTAATGGCAGTGATGGCAAAGGCTATTTTCCGCCGCCCAT |
| RPS18_NM_022551_r1_3 | /5Biosg/CTGTATTTTCCATCCTTTACATCCTTCTGTCTGTTCAAGAACCAGTCTGGGATCTT |
| (SEQ ID NO: 1248) | GTACTGGCGTGGATTCTGCATAATGGTGATCACACGTTCCACCTCATCCTCAGTGAGTTCTCCC |
| RPS18_NM_022551_r1_4 | /5Biosg/GACACGAAGGCCCCAGAAGTGACGCAGCCCTCTATGGGCCCGAATCTTCTTCAGTC |
| (SEQ ID NO: 1249) | GCTCCAGGTCTTCACGGAGCTTGTTGTCCAGACCATTGGCTAGGACCTGGCTGTATTTTCCATC |
| RPS18_NM_022551_r1_5 | /5Biosg/TTGTATATAAACTATTTATTAACAGACAAGGCCTACAGACTTATTTCTTCTTGGAC |
| (SEQ ID NO: 1250) | ACACCCACGGTGCGGCCACGGCGGCCAGTGGTCTTGGTGTGCTGGCCTCGGACACGAAGGCCCC |
| RPS19_NM_001022_r1_1 | /5Biosg/CCGGAGTGTAATAGAGAGAGGATAGAGAGCTCCTGTTCGGAGCTGGGGGAACTTGG |
| (SEQ ID NO: 1251) | CTTCGTTTGCGTCGTTCGTGGCTGGAAGGAACAGTGGTGGAGAATACTATGATGGCGAAAGTAC |
| RPS19_NM_001022_r1_2 | /5Biosg/GTCCCCGCCTAGAGGGGAGGGTGTCTAGTGAGGGGTGGAGAGGTAAAGGGGAGGGC |
| (SEQ ID NO: 1252) | CAAGGGGTCGCGCGTGGAGGCCTGGGTTTCCTCCCGCGTTTCCTTCTCCCGGAGTGTAATAGAG |
| RPS19_NM_001022_r1_3 | /5Biosg/GGTTTCCCGGGCGCACAAGTCGGGCGTAGGGTCTCGCGAGAGTTCCGAAAGCTCGC |
| (SEQ ID NO: 1253) | GAGAGCGAGGGTAGACGCTGAGGCTCCGCCTCTCTCAGGGCGAAAGTTCGTCCCCGCCTAGAGG |
| RPS19_NM_001022_r1_4 | /5Biosg/AGGCTGCCAGAGCTCTGACGAACTCCTGCTGGTTCACGTCTTTTACAGTAACTCCA |
| (SEQ ID NO: 1254) | GGCATCGTGCGGCCTCCGCGCTGCCAGCCAGGGGAAAGGGAACGACGGGGTTTCCCGGGCGCAC |
| RPS19_NM_001022_r1_5 | /5Biosg/CGTGTAGAACCAGTTCTCATCGTAGGGAGCAAGCTCTTTGTGCTTGGCCAGCTTGA |
| (SEQ ID NO: 1255) | CGGTATCCACCCATTCGGGGACTTTCAGCTTCCCGGACTTTTTGAGGAAGGCTGCCAGAGCTCT |
| RPS19_NM_001022_r1_6 | /5Biosg/CTGGGCATGACGCCGTTTCTCTGACGTCCCCCATAGATCTTGGTCATGGAGCCAAC |
| (SEQ ID NO: 1256) | CCCAGCGCCACCCCGGAGGTACAGGTGCCGCGCTGTGGAAGCAGCTCGCGTGTAGAACCAGTTC |
| RPS19_NM_001022_r1_7 | /5Biosg/GGTGTCAGTTTGCGGCCGCCATCTTGGTCCTTTTCCACCATTTTCAGCCCCTCCAG |
| (SEQ ID NO: 1257) | GGCTTGGAGGACCCGGCGGGCCACACTCTTGGAGCCTCGGCTGAAGTGGCTGGGCATGACGCCG |
| RPS19_NM_001022_r1_8 | /5Biosg/TTTACGAATGAGGCAATTTATTAACCCAGCATGGTTTGTTCTAATGCTTCTTGTTG |
| (SEQ ID NO: 1258) | GCAGCTGCCACCTGTCCGGCGATTCTGTCCAGATCTCTTTGTCCCTGAGGTGTCAGTTTGCGGC |
| RPS20_NM_001023_r1_1 | /5Biosg/GGACCAAAAATCCTCAGCCCTTACGACCGCGTCTTCCTCAAAAAGAAAGGGGTGGG |
| (SEQ ID NO: 1259) | ACTTGAGCAACGCTTATATAGCACGCTTGCATCCGGGTCCCACACGCCCCGGAACAGGAAATAT |
| RPS20_NM_001023_r1_2 | /5Biosg/CTCCGGCTCCACGGGTGTTTTTCCGGTATCCTTAAAAGCCATGGCTGTTGCGCGCG |
| (SEQ ID NO: 1260) | GGCTTCCTGACCGACTTGTTCCTCGGCGAGAGCGAACAGCGGTGAGTCAGGAGCAGGAGCGTGC |
| RPS20_NM_001023_r1_3 | /5Biosg/AACTGGTCCTTTCACTTTGAGATTCTTTTCTTTTGCGCCTCTTATCAAGTCAGCAC |
| (SEQ ID NO: 1261) | ACACCTTTTCCAAGGATTTTACGTTGCGGCTTGTTAGGGTGATTCGAATTCGGTGAATTGCCAC |
| RPS20_NM_001023_r1_4 | /5Biosg/AGGACTGTGCAAGTCAATGAGTCGCTTGTGAATTCTCATCTGGAAACGATCCCACG |
| (SEQ ID NO: 1262) | TCTTAGAACCTTCACCACAAGGAGTTTTTCTTGTAGTGATTCTCAAAGTCTTGGTAGGCATTCG |
| RPS20_NM_001023_r1_5 | /5Biosg/CAGAAGTTAACAACTGGTCATCAATTTATTAAAATAGTTGACTTAAGCATCTGCAA |
| (SEQ ID NO: 1263) | TGGTGACTTCCACCTCAACTCCTGGCTCAATACTGATGGAAGTAATCTGCTTAACAATCTCAGA |
| RPS20_NM_001023_r1_6 | /5Biosg/AACGACAACGAAAACAGGATAGACCACTCTAAGATACCCATATATTCCACCTGAAA |
| (SEQ ID NO: 1264) | AGTGGAAGTCTCATAGTACACCTTTATATTCCTAAAATCTGCCAGTATTCTGAATAAAAACCAA |
| RPS20_NM_001023_r1_7 | /5Biosg/TCCCCATACCAATCAGAATTTATCTAGAGTATGCCAAAGTTATAAACTGCCAGTGT |
| (SEQ ID NO: 1265) | CCAATAAAACCAGTCAGGTCTCACATATTATGTAGTTAACGGAATCCAGTTTTCAAATGACTCA |
| RPS21_NM_001024_r1_1 | /5Biosg/GTCCACGAACTCGCCGGCGTCGTTCTGCATTTCGAGGCTGGGCTGCGCCTGCTGCC |
| (SEQ ID NO: 1266) | ACCACACCGCGCGCGAGAGAGAAAGGAAGCAGCTAGTCACCCGGCAGAGATATCGGCGGGCAAG |
| RPS21_NM_001024_r1_2 | /5Biosg/CTTGTCAACCTCGGCCACGTTCATCTGGATGGATGCGTGGTCCTTGGCACCGATGA |
| (SEQ ID NO: 1267) | TGCGATTGCTAGCGGAGCATTTCCGCGGCACGTACAGGTCCACGAACTCGCCGGCGTCGTTCTG |
| RPS21_NM_001024_r1_3 | /5Biosg/CCAATCGGAGAATGGAATCATCTGACTCACCCATCCTACGAATGGCCCCGCAGATA |
| (SEQ ID NO: 1268) | GCATAAGTTTTAAACTGGCCATTAAACCTGCCTGTGACCTTGTCAACCTCGGCCACGTTCATCT |
| RPS21_NM_001024_r1_4 | /5Biosg/TTTTTAGGTTTTCATTATTTATTTATGACAAATATTCCACATCTGTGATTCTCTCC |
| (SEQ ID NO: 1269) | AGTCAAAAGTTCTTTGAGACGATGCCATCGGCCTIGGCCAATCGGAGAATGGAATCATCTGACT |
| RPS23_NM_001025_r1_1 | /5Biosg/AGTACGAAGTCCACGACACTTGCCCATCCTGTCGGCGCCACGGGCCTGAGCGAAAG |
| (SEQ ID NO: 1270) | AGAGAAGCACCGCAGGAAGGAGCCACAAGCCACCGCGAGCAAGCCCCGCCCAGCCAAGGACCCC |
| RPS23_NM_001025_r1_2 | /5Biosg/CTTTTGCATGAGAAGCACCTCCAAAAGGGTTGGCCTTTAGGGCTGTGCCCAAATGA |
| (SEQ ID NO: 1271) | GCTTTCTTATACTGTTTATCATGCCACTTCTGGTCTCGTCGGTGACTACGGAGCTTCCTAGCAG |
| RPS23_NM_001025_r1_3 | /5Biosg/GTCATTGGGTACAAAGGCTGTGATTTTCTTGCCATTCTTGATCAGCTGGACCCTTA |
| (SEQ ID NO: 1272) | CACACTTCCTAATGGCAGAATTTGGCTGTTTGGCTTCAACTCCTACTTTTTCCAGCACGATTCC |
| RPS23_NM_001025_r1_4 | /5Biosg/CATTGGCTACTTTGACAACCTTAAAGCGGACTCCAGGAATATCACCAACAGCATGA |
| (SEQ ID NO: 1273) | CCTTTGCGACCAAATCCAGCAACCAGAACTTCATCATTTTCCTCAATAAAGTTCAAGCAACCGT |
| RPS23_NM_001025_r1_5 | /5Biosg/GGACAGTAAGATACAAACATTTTTTGGCATATGAAAATTTATTACTACAGTGTTTT |
| (SEQ ID NO: 1274) | CACCATTAATATTTATGATCTTGGTCTTTCGTTCTTGCCTTTGTATAGGGCCAAAAGAGAAACA |
| RPS23_NM_001025_r1_6 | /5Biosg/ACAACCGTGTCTTATTGTCTCCTAAAATTGGTACAGGTCCTGCGTTTGCTGGTTTA |
| (SEQ ID NO: 1275) | GGATAAAAAAAATAAGGGGGGGTGGTGGTGGTAATGAACATGATCTTCGTGGTGAGAACAGGGG |
| RPS23_NM_001025_r1_7 | /5Biosg/TTCTTAAAGTAATACTACAATACTGCACATTTATTCCAGATCTATCCCATTTTCTT |
| (SEQ ID NO: 1276) | ATTCCACAGGATGAGGGAAACTGTGCCAGGTTACAAATGTTATTAACTCTAGAGAATCCTGAAA |
| RPS23_NM_001025_r1_8 | /5Biosg/TAATCTATGTGCAATGAAATTTGGTAACTGAAGTGTTGCACCCGATATGGAAAATA |
| (SEQ ID NO: 1277) | CCAAGAATAAAAAAGAAAGTATCTCACTAGAATTTCAGTGAGTTTTTGAAGTTCCCTTAAAGTT |
| RPS23_NM_001025_r1_9 | /5Biosg/CAGATCCTGACACCTTTAAATAATAAACAGAGTGGGGAGCAATTTTGAGTTTACTA |
| (SEQ ID NO: 1278) | TTTATCATCTTGGGCCCCTGTAAGATGGATACAAGAATGTGCATTTCCAAGGGTACCTAAGATA |
| RPS23_NM_001025_r1_10 | /5Biosg/ACTGAAAACATCAGTCTTGTCGTATACCTTATCTCCCTTGCCTGGCATATACTTCC |
| (SEQ ID NO: 1279) | ATCAACTAAATGATCCAATGCCTGTATTCTCCTAAACACATTAATGTAGACACATTACAACACA |
| RPS23_NM_001025_r1_11 | /5Biosg/GTACTCAATACCTAGCTTAAATTATCAAAACACAACCAATCTTGTCTCTACACTAA |
| (SEQ ID NO: 1280) | ACCACTTCATTTGCTGACTAGTCTTTGAAGACATGAAGGTCTCTGACAACCTCATGAGAAGATA |
| RPS23_NM_001025_r1_12 | /5Biosg/TGTTAACAGGAGTTTCTTACATCAGATTTAAAGCAGAAGGCTCACAGCTTCATTTC |
| (SEQ ID NO: 1281) | AACCATGCCACTGTATCCATGAAAACTCTGAAACAAGTATTTGTGGACAGCAAAATCCACATGT |
| RPS23_NM_001025_r1_13 | /5Biosg/AAAGGTTCTGCTCTTGATCCTACGGAAAGTGGGCAACCAAACCAATTGTTTTCCAA |
| (SEQ ID NO: 1282) | AGATCCTAAAGAATGTAAAGCTAGGCTTTGATCAAAGGGCTAATTAACCCATACTTACTATTTG |
| RPS23_NM_001025_r1_14 | /5Biosg/TGAGGATGACCAACTGAGACCAGTGTTGCTGGAGCACAAAGTGCCAAGGAGAGAAA |
| (SEQ ID NO: 1283) | TGGCAGGCTAAGGCTGGAATATGCAGGTATGAAGCGCAACCTGGGTTCTTCTGTGCCATGTGAA |
| RPS23_NM_001025_r1_15 | /5Biosg/TCAAGAGATAAACCGAAGTGTGCTGGAAAACACACGAGCTCTTTAGTAAGAGCAGG |
| (SEQ ID NO: 1284) | CGACATGCAAGGAACCATAGTAACAGGAACAGAGGTCCTGAGGCTGGATATGGAACCCAAGTTT |
| RPS23_NM_001025_r1_16 | /5Biosg/TGTTGAGCCCCTGGGAACAGCTTAGCCAAATACTGACTGCAGCTACACGTTAGGAA |
| (SEQ ID NO: 1285) | ACACTGGTACAAACCAACAGGCAGCCTTTCCGCCCTTGCGGAGGGAGAGACTAGCATCATCATC |
| RPS23_NM_001025_r1_17 | /5Biosg/GCCTGGAATCGCGCTGCAACCGCGGCCTCTTTCCCTGGTTCTGGCCAGGTGAGCGA |
| (SEQ ID NO: 1286) | GGCCTAGCAATCTCTCGCGCATCACAAAGGATTGGGTCAGTTAAGGCTCATCCGAAAGCATCTG |
| RPS23_NM_001025_r1_18 | /5Biosg/CCAGGCCACATCCCTGGGCGCCCGCGCTGTCCCACTCCCTTCCTGGTGCGCCCCGC |
| (SEQ ID NO: 1287) | CTCGCGGTCACAAGGGCCCCACCGCCCGGGGAGAGCTGCCCACCCCGCGCCTGACGCCCAGGGC |
| RPS23_NM_001025_r1_19 | /5Biosg/AGCCCCTGGGCCTCAGGTAGGACTGCTTAGCAGTGAAAAGGGCGTCCTGGGTGCAG |
| (SEQ ID NO: 1288) | CCAACAGGGTACAGCTGCAAGCCATTGTTGAAGGTGTCTTGACGTATCAGAGAAGGCAGGTAAC |
| RPS23_NM_001025_r1_20 | /5Biosg/ACACAAGGCAGTGGGGAAAGGGGCTGGGGGGCCACACAGAGAAAGGAGAAGGCACT |
| (SEQ ID NO: 1289) | AAGATCAGGCTCAGCAGCTTCTGGATCTGAGGCGCCGGAGATTATTTATGGGTCAATCTGGCAG |
| RPS23_NM_001025_r1_21 | /5Biosg/GTTTTAAGATAAATCCGTTGGCGATACTTCTGAATGTCTATTTATGGATTCCCTAT |
| (SEQ ID NO: 1290) | CTTATTTTATTGATGTGTATTTTTGTCTCTCCTCCATGGATACATGAAGGAAAGGGCCTTGGAC |
| RPS23_NM_001025_r1_22 | /5Biosg/TAGATATATGATCCATTTTGAGTTAAGTTTGTATTACATGTAAGGTTGGGGTTCCT |
| (SEQ ID NO: 1291) | TTGTTTTGGTCTTTGACAAATGGAAGTCCACAACATTTATTGAAACTCTTCTTCGTCCATTGGT |
| RPS23_NM_001025_r1_23 | /5Biosg/CCAATTTATCTATTTTTTCTTTTACGGCATGTGCTTTTGGTGTAATGTCTAAAAAC |
| (SEQ ID NO: 1292) | TATACCTACGCCTAGGTTGTAAAGATAGTCTGTTTTCAGTTTTATAGCTTTCCATTTTACATTT |
| RPS23_NM_001025_r1_24 | /5Biosg/CTATTAATTTCTTCCCAACTCAGCCTCCCAAAGTGCTGGGATTACAGGCATGAACC |
| (SEQ ID NO: 1293) | ACAGCGCCCAGCTTAACAGGATTTTTCAGAGAGAAAAAGTTTTTTAATTTTAATGAAATCCACC |
| RPS23_NM_001025_r1_25 | /5Biosg/TTTTCTTAAAACAGGTACTGAGTATAAAACAATATAAAACAATATGAGAAGGTCTC |
| (SEQ ID NO: 1294) | TCTCTTCCCTCAAGAGTGTATGACTTTGCTGCCCAGGATGATCTTGAACTCCTGGCCTCAAGCT |
| RPS23_NM_001025_r1_26 | /5Biosg/TAACATCAGGTTCLAAGTCGTAAGTTGATTTTTAACTACTAGGTTTAGGCCAGGCA |
| (SEQ ID NO: 1295) | GGCCCAGGGCTGGTTTCAGGCCTGGTGCCGGGCTGCCTGTCTTTGATTTCACTTCCTTGTTTTT |
| RPS23_NM_001025_r1_27 | /5Biosg/ATGAAAGGGTCGTGATTGATTGAGCAATCAAGGGGATATGTGACAGGGGTTTCATG |
| (SEQ ID NO: 1296) | CACTGGTACAGAACACAACAGGGAGTTTCACAATTTTTTTATACAATGCTTGGAATCTACGGAT |
| RPS23_NM_001025_r1_28 | /5Biosg/TGTAGAAGGAAGGGCTTTATTCAGCTGGGAGCATCGGCAAGCTACAGCCTTAAAAT |
| (SEQ ID NO: 1297) | CTGAGCTCCTCAAGTGCACAATTTCTGTCCCTTTTAAGGGCTCACAACACTAAAGATTTCACAT |
| RPS24_NM_001026_r1_1 | /5Biosg/GCCAAGGAGGAAAAGAGAACCACGATTCGCCGGCCAATCATATCAACGCGCACGGA |
| (SEQ ID NO: 1298) | AGGACCCCGGGAAGAGCCGGCGTGGGGGCGTGGGCGCGCCACGAGGCTGACCGCGCCGATGCCT |
| RPS24_NM_001026_r1_2 | /5Biosg/GACATCAATGACCATTTGTTTCGTCTGAAGTAGTCGGTTGGTCATGAACTTTCTAG |
| (SEQ ID NO: 1299) | TGCGGATAGTTACGGTGTCGTTCATGATGGCGATCTATCTTCAGACAGCCAAGGAGGAAAAGAG |
| RPS24_NM_001026_r1_3 | /5Biosg/TTCTGAATCCAAAAACAAAGATGACATCCGGTGTGGTCTTGTACATTTTGGCTAGT |
| (SEQ ID NO: 1300) | TTTTCCGGAATTTCTGTCTTAGGCACTGTCGCGTTCCCGGGGTGAAGGACATCAATGACCATTT |
| RPS24_NM_001026_r1_4 | /5Biosg/GGCCATGTCTTGCAAGTCTATGTTTGGGTTCATTTTTCTTTGCATAATCCAGGGAA |
| (SEQ ID NO: 1301) | TCATAAATCATGCCAAAGCCAGTTGTCTTGCCACCACCAAAATGAGTTCTGAATCCAAATACAA |
| RPS24_NM_001026_r1_5 | /5Biosg/TTTTTGCCAGCACCAACATTGGCCTTTGCAGTCCCCCTGACTTTCTTCATTCTGTT |
| (SEQ ID NO: 1302) | CTTGCGTTCCTTTCGTTGCTTTCTTGAGGTCTTTTTCTTCTCATACAGGCCATGTCTTGCAAGT |
| RPS24_NM_001026_r1_6 | /5Biosg/TTTCAAACAACCAGACACATGAAGTTTTTAGTTTATTAATGTTCTTGCGAAAAATC |
| (SEQ ID NO: 1303) | CACAGTGGCCACAGCTAACATCATTGCAGCACCTTTACTCCTTCGGCTTTTTGCCAGCACCAAC |
| RPS25_NM_001028_r1_1 | /5Biosg/GTCTTTCTTGGCCGACTTTCCAGCGTCCTTCTTCTTCTTGTCGTCCTTAGGCGGCA |
| (SEQ ID NO: 1304) | TTGCGAAGCTCGGAGAATAGCAGCAGACACCGCAGCCTCGTCAAGATGTCGGACAAAAAGGAAG |
| RPS25_NM_001028_r1_2 | /5Biosg/AAACAAGACTAAGTTATTGAGCTTGTCCCGAACTTTGCCTTTGGACCACTTCTTCT |
| (SEQ ID NO: 1305) | TTTTGGCCTTGCCCCCGGATTTGTTCACTGGGTCTTTGTCTTTCTTGGCCGACTTTCCAGCGTC |
| RPS25_NM_001028_r1_3 | /5Biosg/CCTCGAATCTTCAGTCTCTCAGAGACCACAGCTGGGGTTATAAGTTTATAGTTGGG |
| (SEQ ID NO: 1306) | AACTTCCTTACAGAGTTTATCATAGGTAGCTTTGTCAAACAAGACTAAGTTATTGAGCTTGTCC |
| RPS25_NM_001028_r1_4 | /5Biosg/TTCTGGTGTAAATTACTTGAGCTCTGTGCTTTGAAACCAGTTTGATAAGTCCTTTA |
| (SEQ ID NO: 1307) | CTAAGGAGCTCCTGAAGGGCTGCCCTGGCCAGGGAGCCTCGAATCTTCAGTCTCTCAGAGACCA |
| RPS25_NM_001028_r1_5 | /5Biosg/TGATTTAATAAAGTTTTATTTTTCCAAATGTACAGCTGGTTGGACCTATTCATGCA |
| (SEQ ID NO: 1308) | TCTTCACCAGCAGCTGGAGCATCTCCACCCTTGGTATTTCTGGTGTAAATTACTTGAGCTCTGT |
| RPS26_NM_001029_r1_1 | /5Biosg/CAGCATTTCTGCTGAAATCTAGGGTGGAAATGCGTTCCTAGTGTTTATTTATCCAT |
| (SEQ ID NO: 1309) | GGAACAAAGTGCACATGGGACTATTTAGCCGGATGGCGGAAGAAAATCGAGGTTATGTGTCTCC |
| RPS26_NM_001029_r1_2 | /5Biosg/CCTGGCAGGGCCCTCCTATATAGCATGAGATCCCTACGCGGACACCGGGAGAATCC |
| (SEQ ID NO: 1310) | TTAGGAGACGGGCTTCAAGAACGGCAACTCACTTTACTCAAATATTCCTTTACATTCAGCATTT |
| RPS26_NM_001029_r1_3 | /5Biosg/CACAGTTAGTGCAGCGAATAGGCTGCACGTGGCCGCGGCCCTTTTTGGCACGACCA |
| (SEQ ID NO: 1311) | TTGTTCCTTCTTTTCTTTGTCATCTTGGAGGCACGGACCGGAGAGAGGAGACGGTGCCTGGCAG |
| RPS26_NM_001029_r1_4 | /5Biosg/AGCACATAGGCATCGAAGACGCTCGCTTCAGAAATGTCCCTGACTGCTGCGGCCTC |
| (SEQ ID NO: 1312) | CACTATGTTTCGAATGACGAATTTCTTAATGGCCTTGTCCTTGGGCACGCATCGGGCACAGTTA |
| RPS26_NM_001029_r1_5 | /5Biosg/AAATCGGGGTGGGGGTGTTCGGTCCTTGCGGGCTTCACGAGATCGATTCCTGACTA |
| (SEQ ID NO: 1313) | CTTTGCTGTGAATTGCACAACTCACACAGTAATGTAGCTTCACATACAGCTTGGGAAGCACATA |
| RPS26_NM_001029_r1_6 | /5Biosg/AAGTACAATTTCCATTTTATTTTTCTCCAGAGAATAGCCTGTCTTCAGTCTTTAAG |
| (SEQ ID NO: 1314) | AACTCAGCTCCTTACATGGGCTTTGGTGGGGGACGTGGGGCAGCACCCGCAGGTCTAAATCGGG |
| RPS27_NM_001030_r1_1 | /5Biosg/TTGGGGCTCTGCACCAGGCGTTTCTTCTTGTGTTTCCTCTTCTCCTCTTCTGGAGA |
| (SEQ ID NO: 1315) | GGGATGAAGGAGATCCTTTGCGAGAGGCATGTTCTCGTGTGCGTAGGTCGTCACCGCCGGAAAG |
| RPS27_NM_001030_r1_2 | /5Biosg/CTGTAGGCTGGCAGAGGACAGTGGAGCAGCCAACACACAAAACTACCGTTTGTGCA |
| (SEQ ID NO: 1316) | TGGCTAAAGACCGTGGTGATTTTATAGCATCCTGGGCATTTCACATCCATGAAGTAGGAATTGG |
| RPS27_NM_001030_r1_3 | /5Biosg/TCAGGATTTATCCAAAATGTGTTTATTGAGATGGTTTCCCACTCATCTTGACTCAG |
| (SEQ ID NO: 1317) | AGTGCTTTTAGTGCTGCTTCCTCCTGAAGGAACATCCTTCTGTAAGCCTTGCTTTTCCTCCTGT |
| RPS28_NM_001031_r1_1 | /5Biosg/ACCTGCGTGCACTGTCCCTGAGAACCGGTCCTGCCCAGGACCTTGGTGACCCTGGC |
| (SEQ ID NO: 1318) | CAGCTTGATAGGCTGCACACGGCTGGTGTCCATGATGGCGGCGCGGCGGCGGTCTGGCGGAGAG |
| RPS28_NM_001031_r1_2 | /5Biosg/AAAAGGGTGAGCACGTCGCCCTCGCGCACGGGGCCTTTTACATTGCGGATGATGGA |
| (SEQ ID NO: 1319) | TCGGCTCGTGTCGTCCATGAATTCCACGCGCACCTGCGTGCACTGTCCCTGAGTACCGGTCCTG |
| RPS28_NM_001031_r1_3 | /5Biosg/TCCCATCGGCCAAGTGGTCGAACCCGACATCCAAGACCCAGCGAGCAGCCAAGCTC |
| (SEQ ID NO: 1320) | AGCGCAACCTCCGGGCTTCTCGCTCTGACTCCAAAAGGGTGAGCACGTCGCCCTCGCGCACGGG |
| RPS28_NM_001031_r1_4 | /5Biosg/TTAACTTGAAACACAAACGCTTTATTTAAAGGAGCATCTCAGTTACGTGTGGCGGA |
| (SEQ ID NO: 1321) | CAAAAAAAAGGAGCAGACTGTGACAGACCATTCCCATCGGCCAAGTGGTCGAACCCGACATCCA |
| RPS29_NM_001032_r1_1 | /5Biosg/CCCTGGCCGAATTTTCGCGGGTGGCTCCAGTACAGCTGCTGGTGACCCATCTTGCT |
| (SEQ ID NO: 1322) | CTCAGCAGTGCAACGAGGTAAAAGGAAGAAGCTGGCCCACGCATGCGCTCTTCAAATTTTTGAG |
| RPS29_NM_001032_r1_2 | /5Biosg/TAATGAAACCGATATCCTTCGCGTACTGACGGAAACACTGGCGGCACATATTGAGG |
| (SEQ ID NO: 1323) | CCATATTTCCGGATCAGACCGTGCCGGTTTGAACAGACACGACAAGAGCGAGAACCCTGGCCGA |
| RPS29_NM_001032_r1_3 | /5Biosg/TTTTTGAAGGGTTTTTTCAAATGTTTATTTTATATACAAAGAATTATCATGGTTTT |
| (SEQ ID NO: 1324) | TCATTGAGTAGATGCCCCGGATAATCCTCTGAAGGAAGAGCATTTAGTCCAACTTAATGAAACC |
| RPS2_NM_002952_r1_1 | /5Biosg/TGCCACTGCCGAAACCTCCGCGGAAGCCACCGCGGTTCCCCATCCCAGGGCCACCA |
| (SEQ ID NO: 1325) | GGGCCCCCGGGCCCCCCCGCTGCACCGGCGTCATCCGCCATTTGGTGTTTTGTCGGAAAAGAAG |
| RPS2_NM_002952_r1_2 | /5Biosg/CCTTGACCAACCGGCCCAACTTGGTGACGGGCATCCACTCCTTATCCTCGGCCTTG |
| (SEQ ID NO 1326) | CCTCCGCGAGCTCCGCGGCCTCGGCCCCGGCCCCGTCCACGGCCGCGACCCCGGCCCCGGATGC |
| RPS2_NM_002952_r1_3 | /5Biosg/GGCATAATCTTCAAAACCTCATCCTTGAGAGAGGCCCCCAGGAAGAAATCAATGAT |
| (SEQ ID NO: 1327) | CTCTGATTCCTTAATAGGCAGGGAGAAGAGATAGATCTCCTCCAGGGACTTGATCTTCATGTCC |
| RPS2_NM_002952_r1_4 | /5Biosg/GCGGTGGCCACCTCCTTGGAGCACTTAACACCCAGACCGACGTGGCCATTGTAGTC |
| (SEQ ID NO: 1328) | CCCGATAGCAACAAATGCCTTGAACCTGGTGCGCTGGCCGGCACGGGTCTGCTTCTGCACTGGC |
| RPS2_NM_002952_r1_5 | /5Biosg/GCCGCAGCGGCCTGTCACCTTGCAAGGGACAGTGTGGGGCTTGCCGATCTTGTTCC |
| (SEQ ID NO: 1329) | CCCAGTAGCCTCTGCGCACGGGGACGATGGAGAGCTTGGCCAGGATGATGGCCCCACGGATGGC |
| RPS2_NM_002952_r1_6 | /5Biosg/GCCCCGGGCTGAGGTGTAGCAGTCATCGATACCAGCCATCATGAGCAGCTTCTTAG |
| (SEQ ID NO: 1330) | GCACAGGTGCGGAGACGATGCCAGTGCCCCTGGGTGCAGGGATGAGGCGTACCAGCACAGAGCC |
| RPS2_NM_002952_r1_7 | /5Biosg/CCTGATAGGGAGACTTGGTGAATACAGTCTCCTTCCAGAGGTCGGGGGTCAGGTAG |
| (SEQ ID NO: 1331) | CTGTAGGTCTTAGAAATGGCATCAAAGGTGGCCTTGGCGAAGTTGCCCAGGGTGGCAGTGCAGC |
| RPS2_NM_002952_r1_8 | /5Biosg/CACGCTTAATTCACTTTATTTTTCTTGTATAAAAACCCTATGTTGTAGCCACAGCT |
| (SEQ ID NO: 1332) | GGAGCCTGAGTCCGCTGCACGGAGACTCTGGTGTGGGTCTTGACGAGGTGGTCAGTGAACTCCT |
| RPS3A_NM_001006_r1_1 | /5Biosg/TGCCGCCTTTCGTAAGGCGCTTGTTCTTGCCAACCGCCATGGTGCTGGTCAGAGAG |
| (SEQ ID NO: 1333) | CCAAAAGGGCGGAAGTGGGAGTCGCGCGAGAACTTAGGCGTACGGGGGCGGGGCGCGCCGTCTA |
| RPS3A_NM_001006_r1_2 | /5Biosg/GGTCCTGGTGACGAGCGTCTTTCCAATATTTCTTATATTGAACATAGCAGGTGCTT |
| (SEQ ID NO: 1334) | TCACATCATACCAATCTTTCTTAGAAAATGGATCAACCACTTTCTTCTTGGCTCCCTTTTTGCC |
| RPS3A_NM_001006_r1_3 | /5Biosg/ACATCTTCAGTAATCAGCTTGAATTTTCTAAATGCAACTTCATCATTCTGCAAATC |
| (SEQ ID NO: 1335) | AGCAAGACTCACTTCAAACACACGACCCTTGAGACCATCAGATGCAATTTTGGTTCCTTGGGTC |
| RPS3A_NM_001006_r1_4 | /5Biosg/TAGTCTTGACATCAACGTGAGCTTCAATCATTGTCTGCCATTTTTTGACCATGGAA |
| (SEQ ID NO: 1336) | CACATTTTGTCACGGGTAAGATCCATGCCATGGAAGTTAGTCAGGCAGTTTTTACCCTGAACAT |
| RPS3A_NM_001006_r1_5 | /5Biosg/TCATCTTCTTCCGGATTTGGCGGACCTGTTGGTGCTGAGCATAAGAGGTCTTCCGT |
| (SEQ ID NO: 1337) | ATCTGATTGTTGCGTTTTTTAGTAAAACCAACACAGAACAGACGAAGCAAGTAACCATCGGTAG |
| RPS3A_NM_001006_r1_6 | /5Biosg/GAGAGGATAAATAGATTGGCAAGCCTTTTCTATGTCTTTTCCAATGCTGTCTGGAA |
| (SEQ ID NO: 1338) | TCAATTTATTGACCACTTCTTTCAAGTCATTTGTCTGCACCTCTCGGGTCATGATTTCCATCAT |
| RPS3A_NM_001006_r1_7 | /5Biosg/GTCTCGTCCCCAGTGGCTTTTCCAGAACTACTGCCTTCACCATGAAGCTCCATGAG |
| (SEQ ID NO: 1339) | CTTTCCCAATTCAAACTTGGGCTTCTTCAGCATTTTTACTTTTCTAACGAAGACATCATGGAGA |
| RPS3A_NM_001006_r1_8 | /5Biosg/TCAGAAGCAAACCATCACAAATAGCACTTTTTATTTGCCACTATTTGAAGTCTGAA |
| (SEQ ID NO: 1340) | CTTTAAACAGATTCTTGGACTGGTGGTTCATATCCATCAGCTCGTTCAACTTTAGCACCTGTCT |
| RPS3_NM_001005_r1_1 | /5Biosg/CAGTTCAGCTTTGAAGATGCCATCAGCGACAAACTTCCTCTTCTTGGATATTTGCA |
| (SEQ ID NO: 1341) | CTGCCATCTTGCCGCCGCGCTCCGCTGAAAGGAAAGGAAGTGGCTCGCGGGCGGAAGTGAGTAT |
| RPS3_NM_001005_r1_2 | /5Biosg/CCAAGAACATTCTGTGTTCTGGTGGCTAAGATAATGATTTCTGTCCTGGTTGGTGT |
| (SEQ ID NO: 1342) | AACTCGCACCTCAACTCCAGAGTAGCCATCTTCAGCCAGCTCCCGAGTAAGAAACTCATTCAGT |
| RPS3_NM_001005_r1_3 | /5Biosg/TGGCACACAGACCTCTAGTGGCCACCTTTTCAGCATAAAGCTCTACACTGCCCTCT |
| (SEQ ID NO: 1343) | GGAAAGCCAAACCTCTTCTGAACTACAGCAGTCAGTTCCCGAATCCGCCGGCCCTTCTCACCAA |
| RPS3_NM_001005_r1_4 | /5Biosg/CACAACCTCGCAGCCTTTGGCCCCACTCTCCATGATGAACCGCAGCACACCATAGC |
| (SEQ ID NO: 1344) | AGGCCCTCCGCACAGCAAGCCCTCCTAGGAGTTTGTAACGCAGAGACTCTGCCTGGGCAATGGC |
| RPS3_NM_001005_r1_5 | /5Biosg/AACACGTGGCGCACAGCAGTGTCAACGTAGTAGTTAACAGGGTCTCCGCTGTGGAT |
| (SEQ ID NO: 1345) | CATCAGGCCATCCACAAACTTCATGGATTLAGCCCTCTGTCCTCGGAGTTTCCCAGACACCACA |
| RPS3_NM_001005_r1_6 | /5Biosg/TCTTTGGGTTCCACAATGCTCACGTGGTCAGGCAGGGGCTTCTTAGGGCCAATCTT |
| (SEQ ID NO: 1346) | ACCAGTTGGGTCCCAGGGCAGCATGATCTTCACCTTGATGCCCAGCACACCCTGTCTGAGCAAC |
| RPS3_NM_001005_r1_7 | /5Biosg/CCAGAATACAGCTGCCAAGGAGACCCTGTTATGCTGTGGGGACTGGCTGGGGCATG |
| (SEQ ID NO: 1347) | GCAGGCGGCTCTGGCTTCCCACCCTTCTGTTCTGAGATGGGGGTGGTGGGCAGAATCTCATCTT |
| RPS3_NM_001005_r1_8 | /5Biosg/TATGTAATGCTCCAGAGGCCAACATGCCCCTCAGTCTGAATACTGAACAGTCTAGT |
| (SEQ ID NO: 1348) | CAGACCTTGTGTCTTTGTACAAAATTTTATTAAAGGTCTTTAGAGAGCAACATCCAGACTCCAG |
| RPS3_NM_001005_r1_9 | /5Biosg/CCTTGCTTGCTATCAGCCTTCTCTATCACACAAATATTATTTCTCTGGTTGGCTCT |
| (SEQ ID NO: 1349) | GCTTGGGTCTTACTGTTCTGGCCCTTGCAAATACCACAAGTATGGTTAAAACCAAGAAGATATG |
| RPS3_NM_001005_r1_10 | /5Biosg/CATTTATATTCACTTTCTATGTGCAACGTGGATCGCCTTATGCATAGGAAAAACTC |
| (SEQ ID NO: 1350) | AAACATATCCCTCTTCTAAACCTACAATCCTGAACTACAGGACAACGAATCAAGGTGCTGCCTT |
| RPS3_NM_001005_r1_11 | /5Biosg/GAGCCTTATGTGCCTTCAGTGGTGCAAGCAAATTTCCTTTACACTTTAGAGAGGTT |
| (SEQ ID NO: 1351) | GATTAACGAGTACATATGTAAAGAACACTTAGAGCACAGCATGACACAAAATATAATGGCCATT |
| RPS3_NM_001005_r1_12 | /5Biosg/TCCAGAACATAATAGCCTGTAGTACCAATGACTGGTTCCATGATCCCCTAAGAGAA |
| (SEQ ID NO: 1352) | CACAACTTAGGAATGTGGATTCTAATGATAGCTTTATACTGCTTAGGCAAATTTACTTCTGAGC |
| RPS3_NM_001005_r1_13 | /5Biosg/CTAGTTTTGCCTGAAAAAATAGTGCCGAATTTCTTGTGAAGTACAGACACTGGTAG |
| (SEQ ID NO: 1353) | ALAATACTTCAAAACATTGATAGATAAAATCAGAGACAATTTAAATGTTCTTCACAGTTCTCCA |
| RPS3_NM_001005_r1_14 | /5Biosg/GGCTGCATCACCAGGAAGCAGCCACCTGATAACAGCTTTCCCTGGAAGTCCCCTCT |
| (SEQ ID NO: 1354) | GTGATCAACCAGCATCTGATTTAACAACAGTCTCATGATTTTCAAGCCAACCTGTCCCTCACTA |
| RPS3_NM_001005_r1_15 | /5Biosg/TTACCATGTGCCAAGCAATATAAACACCATGTGCAGCTCAGTCTAATTGAGAAGAA |
| (SEQ ID NO: 1355) | AACCAAATCATCACAGCACCTGCTAAGCCATCTGTGGAGCCAGGGTTATCTCATCAGCCAGGCT |
| RPS3_NM_001005_r1_16 | /5Biosg/CACTATAGAAGTGTACACTTAAATGGTTAAGATGACCAATTTATGAGTCAAAAAGG |
| (SEQ ID NO: 1356) | AAGGGGGGGTCAGATACTTGTCAGTGTACGCCCTACATAATTACCTCAAATATTAAGCCCTTAC |
| RPS3_NM_001005_r1_17 | /5Biosg/TAAGAAAAATAAGTCTACATGTTCAATACACACACAACCATCCTTTTTGATTATTT |
| (SEQ ID NO: 1357) | TTGACCCAAAGTTGGTTGAATCCACAGATGCAAATCCCTTGGACAGAGGGCTAACTCTGTCACT |
| RPS3_NM_001005_r1_18 | /5Biosg/TTTTAGACTTTCAATCTTCACTGGATTACTTTTAATACCTAATGTACATGCTACAT |
| (SEQ ID NO: 1358) | AGCTGTTACAACTGCAGTGTACAAGAAAATAAGTCACAAGAAAATATAGTATTTTGAAAATAAG |
| RPS4X_NM_001007_r1_1 | /5Biosg/ATGCTTCTTGGGACCACGAGCCATGGCTGCGTTAGGCAAGGAAAGAGGACCTCCGT |
| (SEQ ID NO: 1359) | CTTCCGGTGCGCGTAGAAATTGGGGCTGGAGACTGCGCGCGCCGGATTTTCAGCTGCTCCGCCC |
| RPS4X_NM_001007_r1_2 | /5Biosg/AGGAAAATGATGAGGGGGAGACACTCTCTCAACTTGTGGGGACCGGTGGATGGACG |
| (SEQ ID NO: 1360) | AGGAGCAAACACACCGGTCAATTTATCCAGCATCCAATGCTTTGGAGCTGCCACCCGCTTCAGA |
| RPS4X_NM_001007_r1_3 | /5Biosg/TCCATGAATCCAGCAGGGTAGGTTATATCAGTTCGGACCTTGCCATCGATTTTAAT |
| (SEQ ID NO: 1361) | CAACCGCTGCATGCAAATCTTCTTTACTTCATCTCCTGTCAGGGCATACTTAAGTCTGTTCCTC |
| RPS4X_NM_001007_r1_4 | /5Biosg/TTCTCACTTTGCACAACTTGTACTTGGCCTCCTCAGGTGTAATACGATGTACAGCA |
| (SEQ ID NO: 1362) | AAGCGACCCTTGGTGTCATAGATCAGACGGAAATTCTCTCCCGTCTTGTCAATGCTGATGACAT |
| RPS4X_NM_001007_r1_5 | /5Biosg/TGCCAGTCTCCAAATCAATCTGAATGGTATCATTCACCTTGATGAGGGGATCGGGG |
| (SEQ ID NO: 1363) | TAGCGGATGGTGCGGGCATCATGAGTCACCAGATGAGGGATTCCTTTTGTGCCCACAAAGATCT |
| RPS4X_NM_001007_r1_6 | /5Biosg/CACGTCAAAAGATCCAGGGTGCCTCTCTCTGTTGGTGATCACACCAATTCTTCCTA |
| (SEQ ID NO: 1364) | GGTTAGCACCTCCAGTCACCATACACAGGTTACCAGTGTCGAACTTGATGAAATCAGTAATCTT |
| RPS4X_NM_001007_r1_7 | /5Biosg/GGTGAGGCGGATACCCTTTCCTCGGGCAAGAGAAATCCATGGTTTGTTGCCCTTGC |
| (SEQ ID NO: 1365) | CAATAACAAAAATGTTGGAAAGTCGAGTGGCAAAGCTGTTGCCATTGGCATCTTTCACGTGAAC |
| RPS4X_NM_001007_r1_8 | /5Biosg/TGCTATTAATCCTGCCACAATATTTTTAATTACGTACAAAGATCTGACATGTCACC |
| (SEQ ID NO: 1366) | CAGGGACCCATTTCACCCACTGCTCTGTTTGGCCGCCAGTCTTTTGTCTCTCTCTTCAGCAATG |
| RPS4Y1_NM_001008_r1_1 | /5Biosg/ACACCCGTTAGTTTGTCAAGCATCCAATGCTTCGGCGCTGCAACACGCTTTAAGTG |
| (SEQ ID NO: 1367) | CTTCTTGGGGCCCCGGGCCATGGCGAAACTCTGCGACGGAAGAGAATCTGTTCTTTTCCGGTGC |
| RPS4Y1_NM_001008_r1_2 | /5Biosg/TTCTTTACCTCATCTCCAGTCAACGCATACTTGAGTCTATTCCTGAGGAAGACGAT |
| (SEQ ID NO: 1368) | CAGAGGAAGACATTCCCTCAGCTTGTGGGGACCTGTCGATGGACGAGGTGCAAATACACCCGTT |
| RPS4Y1_NM_001008_r1_3 | /5Biosg/GCGGAAATGTTCACCTGTCTTCTCGATGCTGATGACATCCATGAATCCAGCAGGGT |
| (SEQ ID NO: 1369) | ATGTGACATCCACTCGAACCTTGCCATCAATTTTGATGAAACGTTGCATACATATCTTCTTTAC |
| RPS4Y1_NM_001008_r1_4 | /5Biosg/AGGGATTCCCTTCACTCCCACAGTAATCTTCCTCACTTTGCACAACTTGTACTTTG |
| (SEQ ID NO: 1370) | CCTCTTCCACTGTGATGCGGTGAACAGCAAAACGGCCCTTGGTGTCATAGACCAGGCGGAAATG |
| RPS4Y1_NM_001008_r1_5 | /5Biosg/ATTTGATAAAGTTGATTATCTTGCCAGTCCCTAAATCAATCTGCACAGTATCGTTC |
| (SEQ ID NO: 1371) | ACCTTGATGACAGGATCTGGGTAGCGGATGGTTCGAGCATCATGAGTCACCAGGTGAGGGATTC |
| RPS4Y1_NM_001008_r1_6 | /5Biosg/CCTTCACATGCACCACATCAAAAGAACCAGGATGTCTTTCCCTGTTGGTGATCACA |
| (SEQ ID NO: 1372) | CCAACACGACCGAGGTTGGCTCCACCAATCACCATACACAAATTGCCTGTATCAAATTTGATAA |
| RPS4Y1_NM_001008_r1_7 | /5Biosg/GCAACAGTAAGTCGAATGCCCTTTCCCCTGGGCAGGGAAATCCAAGGTTTATTGCC |
| (SEQ ID NO: 1373) | ATTGCCAATGACAAAAATTGTTGGAAAGCCTCGTGGCAAGCTGTTGCCATTGGCATCCTTCACA |
| RPS4Y1_NM_001008_r1_8 | /5Biosg/TTTTTAAGAAACGAGAATTCACTGTTTATTTGTGCAAAGAAAAAAAGATATGCTGC |
| (SEQ ID NO: 1374) | TACTGCAATTTAGCCACTGCTCTGTTTGGTGGCCAGCCTCTTATCTCTCTCTTCAGCAACAGTA |
| RPS5_NM_001009_r1_1 | /5Biosg/GTCTGGGGTCTCTGCCACCGCTGGTGCTGCTGTCTCCCACTCGGTCATCCTGAGAA |
| (SEQ ID NO: 1375) | CACAGCCTGAGCGTCTCTGTCACTCGGCGTAGACCACGCGCCGCCCTGGTACAGACAGCAAGAG |
| RPS5_NM_001009_r1_2 | /5Biosg/TGAGGCAGGTACTTGGCATACTTCTCCTTCACTGCAATGTAATCCTGCAGGGAAAT |
| (SEQ ID NO: 1376) | GTCATTGATCTGCACATCATCGGTGCTCCACTTCCCAAAGAGCTTGATGTCTGGGGTCTCTGCC |
| RPS5_NM_001009_r1_3 | /5Biosg/TCTTGCCGTTGTTGCGGCCGTGCATCATCATGGAGTTAGTGAGGCGCTCCACAATG |
| (SEQ ID NO: 1377) | GGACACTGAGCTTTGCGGAAGCGTTTGGCGGCATACCGCCCTGCACTGTGAGGCAGGTACTTGG |
| RPS5_NM_001009_r1_4 | /5Biosg/ACCACTGTTGATGATGGCGTTCACCAGGACCTGCAGAGGGTTCTCGCCTGTGAGCA |
| (SEQ ID NO: 1378) | GGTGTATGATCTCGAAGGCATGCTTGACGATGCGCACAGTCATGAGCTTCTTGCCGTTGTTGCG |
| RPS5_NM_001009_r1_5 | /5Biosg/CACAGCAGCCAGATGGCCTGGTTCACACGGCGCAGGGGGGACACATCCACAGCCTG |
| (SEQ ID NO: 1379) | TCGTCTCACAGTCCCGGCGCGCCCAATGCGTGTGGAGTCCTCCCGGGGACCACTGTTGATGATG |
| RPS5_NM_001009_r1_6 | /5Biosg/TGGCATAGGAGTTCGAGGAGCCCTTGGCAGCATTGATGAGCTCATCTGCCAGGCAC |
| (SEQ ID NO: 1380) | TCAGCAATGGTCTTAATGTTCCGGAAGGCAGCCTCACGAGCGCCTGTGCACAGCAGCCAGATGG |
| RPS5_NM_001009_r1_7 | /5Biosg/TTTTGGCTGGGACTGCCCCAAAGGGCAGACAGGTTTATTGGGCAGCAGCTGGGAAA |
| SEQ ID NO: 1381) | ATCAGCGGTTGGACTTGGCCACACGCTCCAGCTCGTCCTTCTTCTTAATGGCATAGGAGTTCGA |
| RPS6_NM_001010_r1_1 | /5Biosg/AGTACGAAGTTTGCG7TCATCGTCCACTTCAATGAGTTTCTGGCAGCCAGTGGCTG |
| SEQ ID NO: 1382) | GGAAGGAGATGTTCAGCTTCATCTTGAAGCAGCTGAACGCCTCCGAGGCGCCACGGAAAAGAGG |
| RPS6_NM_001010_r1_2 | /5Biosg/CCTGCTTCATGGGGAAACCTTGTTTGTCGTTCCCACCACTGATTCGGACCACATAA |
| SEQ ID NO: 1383) | CCCTTCCATTCTTCACCCAGAGCGTCAGCAGCAACTTCTGTGGCCATACGCTTCTCATAGAAAG |
| RPS6_NM_001010_r1_3 | /5Biosg/TTTGCATCCACAATGCAACCACGAACTGATTTTCTCTTTCTTTCTCCAGTTCTCCT |
| SEQ ID NO: 1384) | TGGTCTGTAACAGGAATGCCCCTTACTCAGTAGCAGGCGGACACGGCCATGGGTCAAGACACCC |
| RPS6_NM_001010_r1_4 | /5Biosg/AAAGTTTGCGGATTCTGCTAGCTCTTTTGGGGCCCAGGCGGCGAGGCACTGTAGTA |
| SEQ ID NO: 1385) | TCAGTCAGTCCAGGAATATCCTTCTCTCCTTTTTTTACAATAACCAAGTTGAGAACGCTCAGAT |
| RPS6_NM_001010_r1_5 | /5Biosg/ACACGTGGAGTAACAAGACGCTGAATCTTGGGTGCTTTGGTCCTAGGTTTCTTACC |
| SEQ ID NO: 1386) | TTCTTTATTTAAGGGCTTTCTTACAACATACTGGCGGACATCATCTTCTTTAGAGAGATTGAAA |
| RPS6_NM_001010_r1_6 | /5Biosg/CTTCTCCTTAGCCTCCTTCATTCTCTTGGCCAAAAGTTTAGCATATTCTGCAGCCT |
| SEQ ID NO: 1387) | CTTCTTTATTTTTCTTGGTACGCTGCTTCTTCAGAGCAATACGCCGCCGTTTGTGCTGCAGGAC |
| RPS6_NM_001010_r1_7 | /5Biosg/CAGAGTCTGATCTTATTTATTTGTTACTCAAAAAATCTTATTTCTGACTGGATTCA |
| SEQ ID NO: 1388) | GACTTAGAAGTAGAAGCTCGCAGAGAGGAAAGTCTGCGTCTCTTCGCAATTTGTTCCTGGCGCT |
| RPS7_NM_001011_r1_1 | /5Biosg/CTCGAACTGAACATGGCTTTCTCCTGGGAGAACTTGCCGAGCGCCGGCTTAGGAAG |
| SEQ ID NO: 1389) | AGACCCAAATCTCGCGAGAGCACGTCAAAATCCGGCGTCCGAAGGCAAGAGGCGGAAACAGCGC |
| RPS7_NM_001011_r1_2 | /5Biosg/TGAGCCTTGAGGTCCGAGTTCATCTCCAGCTCCAGAAGAGCCTGGGAGATGCCGGA |
| (SEQ ID NO: 1390) | CTCGAACTCGTCCGGCTTCTCGCCATTGGGCTTCACGATCTTGGCGCTCGAACTGAACATGGCT |
| RPS7_NM_001011_r1_3 | /5Biosg/GGAAAGATTTCAGTTGAGGAACGGGAACAAAGATTATGATAGCTTTCCGACCACCA |
| (SEQ ID NO: 1391) | CCAACTTCAATTTCCTTAGCTGCCGTAATATTCAGCTCCCTGAGCTGAGCCTTGAGGTCCGAGT |
| RPS7_NM_001011_r1_4 | /5Biosg/TTCGAGTTGGCTTAGGCAGAATTCTCCTCTGAGCGATAAAGACGACATGCTTCCCA |
| (SEQ ID NO: 1392) | CTGAACTTTTTCTCCAATTCGCGTACTAGCCGGACTTGGATTTTCTGGAAAGATTTCAGTTGAG |
| RPS7_NM_001011_r1_5 | /5Biosg/CCACAATTTCGCTTGGGAAGACCAAGTCCTCAAGGATGGCATCGTGCACAGCTGTC |
| (SEQ ID NO: 1393) | AGAGTACGGCTCCTGGGACGCTTTTGCTTATTTTTTGTACGGCTTTTTCGAGTTGGCTTAGGCA |
| RPS7_NM_001011_r1_6 | /5Biosg/AGAAAAAGTTTCAACCTTGTGTTCCACATTGTTCTGCTGTGCTTTGTCCAAATGAA |
| (SEQ ID NO: 1394) | CCTTTATGAGCCGGCTGCCATCTAGTTTGACGCGGATTCTCTTGCCCACAATTTCGCTTGGGAA |
| RPS7_NM_001011_r1_7 | /5Biosg/TTTACTGTGAATATATACTTTTTATTTAGTCATTTTTGTTTACAATTGAAACTCTG |
| (SEQ ID NO: 1395) | GGAATTCAAAATTAACATCCTTGCCCGTGAGCTTCTTATAGACACCAGAAAAAGTTTCAACCTT |
| RPS8_NM_001012_r1_1 | /5Biosg/CTGGGCGCCCCAACTCATACTTCCGCTTCTTGTGGTAGGGCTTTCTCTTGCCCCCG |
| (SEQ ID NO: 1396) | GTTTTGCGGCGCTTGTGCCAGTTGTCCCGAGAGATGCCCATCGCTCGGCGCTGGCTGGAAAGAG |
| RPS8_NM_001012_r1_2 | /5Biosg/AACACTCTGAGCCCCAGGAGAAATTCCCCACGTCCAACCTCAGGGCACGGTATTTC |
| (SEQ ID NO: 1397) | TTGTTACCTCCCCGCACACGGACTGTGTGGATGCGGCGGGGGCCAATCTTGGTGTTGGCAGCTG |
| RPS8_NM_001012_r1_3 | /5Biosg/GTCGGTACGGTGTGCTGTCGATGAGCACGATGCAATTCTTCACCAGGGTCTTGGTA |
| (SEQ ID NO: 1398) | CGAACCAGCTCGTTATTAGATGCATTGTAGACAACATCGATGATCCTTGTTTTACGAGTACAAC |
| RPS8_NM_001012_r1_4 | /5Biosg/CATATTTCTTCTGAATTTTTTTAGATCGTTTTTTGTTTAAAATCTCTTCTTCCTCA |
| (SEQ ID NO: 1399) | GGAGTCAGCTTGGCTCCCTTCTTGCGGCCCAGGGGCAGCGCATAGTGGGACTCGTACCACTGTC |
| RPS8_NM_001012_r1_5 | /5Biosg/CATAGCCATCTGCTCGGCCACACTGTCCCGGCCTTGAAGCGATGCACGCAAGAAGC |
| (SEQ ID NO: 1400) | TTGCCCTGCTGGAACTGCTCCTCCAGGAGACTGCTGATTTTGGCATTCTTTTTCCTTTCATCAT |
| RPS8_NM_001012_r1_6 | /5Biosg/TGTGGGAACAAAACAATAAACACCTTTATTACATGGGTGAAGACAAAACAAGGATT |
| (SEQ ID NO: 1401) | TATTTGCCTTTGCGGGCCTTGATTTTCCTAAGATAGAACTCCAACTCTTTGCCCTCTAGCACAT |
| RPS9_NM_001013_r1_1 | /5Biosg/TCTCGAAGGGTCTCCGCGGGGTCACATAAGTTTTGCGACAAACCCAGCTCCGGGCC |
| (SEQ ID NO: 1402) | ACTGGCATGTTGGCTCCGCTTCCCCGTCTGCGCCTAAGCAAACCACCCGGTCACTGAGAAAGAG |
| RPS9_NM_001013_r1_2 | /5Biosg/CAGCAGTTCCCGGGCGGCCTTGCGGATCTTGGCCAGGGTAAATTTGACCCTCCAGA |
| (SEQ ID NO: 1403) | CCTCACGTTTGTTCCGGAGCCCATACTCGCCGATCAGCTTCAGCTCTTGGTCGAGACGAGATTT |
| RPS9_NM_001013_r1_3 | /5Biosg/TCAGGCCCAGGATGTAATCCAGCTTCATCTTGCCCTCATCCAGCACCCCAATGCGG |
| (SEQ ID NO: 1404) | ACCAGCCGCCGCAGCAGGGCGTTGCCTTCGAACAGACGCCGTGGGTCCTTCTCATCAAGCGTCA |
| RPS9_NM_001013_r1_4 | /5Biosg/CTGCTTGCGGACCCTGATATGGCGCTGGCGGATCAGCACGCGAGCGTGGTGGATGG |
| (SEQ ID NO: 1405) | ACTTGGCCAAGCCCAGCTTGAAGACCTGGGTCTGCAGGCGTCTCTCTAAGAAATCCTCTATCTT |
| RPS9_NM_001013_r1_5 | /5Biosg/TCTTGGCATTCTTCCTCTTCACGCGGCCCGGGCGGCCACCCCCGTAGGGAGAGCGC |
| (SEQ ID NO: 1406) | AGAGAGAAGTCGATGTGCTTCTGGGAATCCAGGCGGACAATGAAGGACGGGATGTTCACCACCT |
| RPS9_NM_001013_r1_6 | /5Biosg/TTGTAAAGCGCTGATCCTGTTTATTTGGCAGGAAAACGAGACAATCCAGCAGCCCA |
| (SEQ ID NO: 1407) | GGAGGGACAGGTGGACTTAATCCTCCTCCTCGTCGTCTCCAGCCCCAGCCCCACCCTGGCCCTT |
| RPSA_NM_002995_r1_1 | /5Biosg/TCCTTCATTTGCAGGACATCAAGGGCTCCGGACATTGTGAAAATTTCCCTTTAAGT |
| (SEQ ID NO: 1408) | TACGACGGGAATCCAGAACAACGCCGTATGGACCCCTCTGCAGGTAGCACGGAAAAGACAGGCG |
| RPSA_NM_002995_r1_2 | /5Biosg/TTTATGATATAGATGCCATCACTTTTCCTTTTATAGATGTACTGTTCCATCTGGAA |
| (SEQ ID NO: 1409) | GTCAAGATTGGTGCCACCTAAGTGGGTTCCTGCTGCAAGGAACTTAAGGACATCCTCCTCCTTC |
| RPSA_NM_002995_r1_3 | /5Biosg/CAGCACAGCCCTCTGGCCAGTATTCCTGGAGGATATAACACTGACATCAGCAGGGT |
| (SEQ ID NO: 1410) | TTTCAATGGCAACAATTGCACGAGCTGCCAGCAGAAGCTTCTCCCAGGTCCTCTTGAGATTTAT |
| RPSA_NM_002995_r1_4 | /5Biosg/GTCAGTAACCACAAGAAGCCGTGGCTCCCGGAAGGCTGCCTGGATCTGGTTAGTGA |
| (SEQ ID NO: 1411) | AGGTTCCAGGAGTGAAGCGGCCAGCAATTGGAGTGGCTCCAGTGGCAGCAGCAAACTTCAGCAC |
| RPSA_NM_002995_r1_5 | /5Biosg/TGTTGCATGGGATGGCAATGTCCACATAGCGCAGAGGAGAATCTGTGTTACACAGC |
| (SEQ ID NO: 1412) | GCAATGGTAGGTAGGTTAACATAAGATGCCTCCGTGAGAGGCTGGTGGTCAGCCCTGGGGTCAG |
| RPSA_NM_002995_r1_6 | /5Biosg/AGTACAGATCAGGCATGACCTCCCATGGGTGTTCACGGGAAATGGTGCCACGCATG |
| (SEQ ID NO: 1413) | CGCAGAACTTCCCGAGCCAGCATCCACCACATCAAACCCACTGAGTGAGCTCCCTTGTTGTTGC |
| RPSA_NM_002995_r1_7 | /5Biosg/GTAGCAGTGAACTCAGGAGCGGGAGCAGTCCATTCACCCTGAAATTCCTCCTTGGT |
| (SEQ ID NO: 1414) | CACTGCCTTCTCAGCAGCAGCCTGCTCTTCTTTTTCAATCTCTTCAGGATCTCTGTAGAAGTAC |
| RPSA_NM_002995_r1_8 | /5Biosg/GCTGCAGACCAGTCTTCCGTGGCAGGCTGAGCGCTCCAGTCTTCAGTAGGGAATTG |
| (SEQ ID NO: 1415) | CTGAATAGGCACAGAGGGCACCTGTACACCTTCAGACCAGTCTGCAACCTCAGGCTGAGTAGCA |
| RPSA_NM_002995_r1_9 | /5Biosg/AACTGATGTTTATTTTCCATCAACCATTTTTCCATGCTGCTTAAGAGCCTATGCAA |
| (SEQ ID NO: 1416) | GAACAGCTTAAGACCAGTCAGTGGTTGCTCCTACCCATTCAGTGGCCTGAGCAGTGGGAGCTGC |
| RPSA_NM_002995_r1_10 | /5Biosg/TTTTTTAGAAGTACAACTCATGTCGAGACATGTATTTATTATTATGCTTTGATATG |
| (SEQ ID NO: 1417) | CAATCCCAGGTATTCTGATCTGGAGTAAAAAGCAAACTAAATGAAGACAACTTTTAGAAACTGA |

APPENDIX 9
Human globin mRNA sequences

LOCUS NM_000558 576 bp mRNA linear PRI 18 JAN. 2014
DEFINITION Homo sapiens hemoglobin, alpha 1 (HBA1), mRNA.
(SEQ ID NO: 1418)

| | |
|---|---|
| 1 | actcttctgg tccccacaga ctcagagaga acccaccatg gtgctgtctc ctgccgacaa |
| 61 | gaccaacgtc aaggccgcct ggggtaaggt cggcgcgcac gctggcgagt atggtgcgga |
| 121 | ggccctggag aggatgttcc tgtccttccc caccaccaag acctacttcc cgcacttcga |
| 181 | cctgagccac ggctctgccc aggttaagag ccacgacaag aaagtggccg acgcgctgac |
| 241 | caacgccgtg gcgcacgtgg acgacatacc caacacgctg tccgccctga gcgacctgca |
| 301 | cgcgcacaag cttcgggtgg acccggtcaa cttcaagctc ctaagccact gcctgctggt |
| 361 | gaccctggcc gcccacctcc ccgccgagtt cacccctgcg gtgcacgcct ccctggacaa |
| 421 | gttcctggct tctgtgagca ccgtgctgac ctccaaatac cgttaagctg gagcctcggt |
| 481 | ggccatgctt cttgcccctt gggcctcccc ccagcccctc ctccccttcc tgcacccgta |
| 541 | cccccgtggt ctttgaataa agtctgagtg ggcggc |

LOCUS NM_000517 622 bp mRNA linear PRI 18 JAN. 2014
DEFINITION Homo sapiens hemoglobin, alpha 2 (HBA2), mRNA.
(SEQ ID NO: 1419)

| | |
|---|---|
| 1 | cataaaccct ggcgcgctcg cgggccggca ctcttctggt ccccacagac tcagagagaa |
| 61 | cccaccatgg tgctgtctcc tgccgacaag accaacgtca agaccgcctg gggtaaggtc |
| 121 | ggcgcgcacg ctggcgagta tggtgcggag gccctggaga gaatgttcct gtccttcccc |
| 181 | accaccaaga cctacttccc gcacttcgac ctgagccacg gctctgccca ggttaagggc |
| 241 | cacggcaaga aggtggccga cgcgctgacc aacgccgtgg cgcacgtgga cgacatgccc |
| 301 | aacgcgctgt ccgccctgag cgacctgcac gcgcacaagc ttcgggtgga cccagtcaac |
| 361 | ttcaagctcc taagccactg cctgctggtg accctggcca cccacctccc cgccgagttc |
| 421 | acccctgcgg tgcacgcctc cctggacaag ttcctggctt ctgtgagcac cgtgctgacc |
| 481 | tccaaatacc gttaagctgg agcctcggta gccgttcctc ctgcccgctg ggcctcccaa |
| 541 | cgggccctcc tcccctcctt gcaccggccc ttcctggtct ttgaataaag tctgagtggg |
| 601 | cagc |

LOCUS NM_000518 626 bp mRNA linear PRI 18 JAN. 2014
DEFINITION Homo sapiens hemoglobin, beta (HBB), mRNA.
(SEQ ID NO: 1420)

| | |
|---|---|
| 1 | acatttgctt ctgacacaac tgtgttcact agcaacctca aacagacacc atggtgcatc |
| 61 | tgactcctga ggagaagtct gccgttactg ccctgtgggg caaggtgaac gtggatgaag |
| 121 | ttagtggtga ggccctgagc aggctgctgg tagtctaccc ttggacccag aggttatttg |
| 181 | agtcctttga ggatctgtcc actcctgatg ctgttatggg caaccctaag gtgaaggctc |
| 241 | atggcaagaa agtgctcggt gcctttagtg atggcctggc tcacctggac aacctcaagg |
| 301 | gcacctttgc cacactgagt gagctgcact gtgacaagct gcacgtggat cctgagaact |
| 361 | tcaggctcct gggcaacgtg ctggtctgtg tgctggccca tcactttggc aaagaattca |
| 421 | ccccaccagt gcaagctgcc tatcagaaag tggtgactgg tgtggctaat gccctggccc |
| 481 | acaagtatca ctaagctcgc tttcttgctg tccaatttct attaaaggtt cctttgttcc |
| 541 | ctaagtccaa ctactaaact aggggatatt atgaagggcc ttgagcatct ggattctgcc |
| 601 | taataaaaaa catttatttt cattgc |

LOCUS NM_000519 774 bp mRNA linear PRI 10 JAN. 2014
DEFINITION Homo sapiens hemoglobin, delta (HBD), mRNA.
(SEQ ID NO: 1421)

| | |
|---|---|
| 1 | agggcaagtt aagggaatag tggaatgaag gttcattttt cattctcaca aactaatgaa |
| 61 | accctgctta tcttaaacca acctgctcac tggagcaggg aggacaggac cagcataaaa |
| 121 | ggcagggcag agtcgactgt tgcttacact ttcttctgac ataacagtgt tcactagcaa |
| 181 | cctcaaacag acaccatggt gcatctgact cctgaggaga agactgctgt caatgccctg |
| 241 | tggggcaaag tgaacgtgga tgcagttgat ggtgaagccc tgagcagatt actggtggtc |
| 301 | tacccttgga cccagaggtt ctttgagtcc tttggggatc tgtcctctcc tgatgctgtt |
| 361 | atgggcaacc ctaaggtgaa ggctcatggc aagaaggtgc taggtgcctt tagtgatggc |
| 421 | ctggctcacc tggacaacct caagggcact ttttctcagc tgagtgagct gcactgtgac |
| 481 | aagctgcacg tggatcctga gaacttcagg ctcttgggca atgtgctggt gtgtgtgctg |
| 541 | gcccgcaact ttggcaagga attcacccca caaatgcagg ctgcctatca gaaggtggtg |
| 601 | gctggtgtgg ctaatgccct agctcacaag taccattgag atcctggact gtttcctgat |
| 661 | aaccataaga agaccctatt tccctagatt ctattttctg aacttgggaa cacaatgcct |
| 721 | acttcaaggg tatggcttct gcctaataaa gaatgttcag ctcaacttcc tgat |

LOCUS NM_000559 584 bp mRNA, linear PRI 10 JAN. 2014
DEFINITION Homo sapiens hemoglobin, gamma A (HBG1), mRNA.
(SEQ ID NO: 1422)

| | |
|---|---|
| 1 | acactcgctt ctggaacatc tgagattatc aataagctcc tagtccagac gccatgggtc |
| 61 | atttcacaga ggaggacaag gctactatca caagcctgtg gggcaaggtg aatgtggaag |
| 121 | atgctggagg agaaaccctg ggaaggctcc tggttgtcta cccatggacc cagaggttct |
| 181 | ttgacagctt tggcaacctg tcctctgcct ctgccatcat gggcaacccc aaagtcaagg |
| 241 | cacatggcaa gaaggtgctg acttccttgg gagatgccac aaagcacctg gatgatctca |
| 301 | agggcacctt tgcccagctg agtgaactac actgtaacaa gctgcatgtg gatcctgaaa |
| 361 | acttcaagct cctgggaaat gtgctggtga ccgttttggc aatccatttc ggcaaagaat |
| 421 | tcacccctga ggtgcaggct tcctggcaga agatggtgac tgcagtggcc agtgccctgt |
| 481 | cctccagata ccactgagct cactgcccat gattcagagc tttcaaggat aggctttatt |
| 541 | ctgcaagcaa tacaaataat aaatctattc tgctgagaga tcac |

LOCUS NM_000184 583 bp mRNA linear PRI 10 JAN. 2014
DEFINITION Homo sapiens hemoglobin, gamma G (HBG2), mRNA.
(SEQ ID NO: 1423)

| | |
|---|---|
| 1 | acactcgctt ctggaacgtc tgaggttatc aataagctcc tagtccagac gccatgggtc |
| 61 | atttcacaga ggaagacaag actactatca caagcctgtg ggacaaggtg aatgtggaag |
| 121 | atgctggagg agaaaccctg ggaaggctcc tggttgtcta cccatggacc cagaggttct |
| 181 | ttgacagctt tggcaacctg tcctctgcct ctgccatcat gggcaacccc aaagtcaagg |
| 241 | cacatggcaa gaaggtgctg acttccttgg gagatgccat aaagcacctg gatgatctca |
| 301 | agggcacctt tgcccagctg agtgaactgc actgtgacaa gctgcatgtg gatcctgaga |
| 361 | acttcaagct cctgggaaat gtgctggtga ccgttttggc aatccatttc ggcaaagaat |
| 421 | tcacccctga ggtgcaggct tcctggcaga agatggtgac tggagtggcc agtgccctgt |
| 481 | cctccagata ccactgagct cactgcccat gatgcagagc tttcaaggat aggctttatt |
| 541 | ctgcaagcaa tcaaataata aatctattct gctaagagat cac |

APPENDIX 10
DNA globin mRNA Capture Probes/Baits
(Note: /5Biosg/ = 5′-biotin)

| Name | Sequence |
|---|---|
| NM_000558_HS_HBA1_r1_1 | /5Biosg/TCCGCACCATACTCGCCAGCGTGCGCGCCGACCTTACCCCAGGCGGCCTTGACGTT |
| (SEQ ID NO: 1424) | GGTCTTGTCGGCAGGAGACAGCACCATGGTGGGTTCTCTCTGAGTCTGTGGGGACCAGAAGAGT |
| NM_000558_HS_HBA1_r1_2 | /5Biosg/GCGTCGGCCACCTTCTTGCCGTGGCCCTTAACCTGGGCAGAGCCGTGGCTCAGGTC |
| (SEQ ID NO: 1425) | GAAGTGCGGGAAGTAGGTCTTGGTGGTGGGGAAGGACAGGAACATCCTCTCCAGGGCCTCCGCA |
| NM_000558_HS_HBA1_r1_3 | /5Biosg/TGGCTTAGGAGCTTGAAGTTGACCGGGTCCACCCGAAGCTTGTGCGCGTGCAGGTC |
| (SEQ ID NO: 1426) | GCTCAGGGCGGACAGCGCGTTGGGCATGTCGTCCACGTGCGCCACGGCGTTGGTCAGCGCGTCG |
| NM_000558_HS_HBA1_r1_4 | /5Biosg/CGGTATTTGGAGGTCAGCACGGTGCTCACAGAAGCCAGGAACTTGTCCAGGGAGGC |
| (SEQ ID NO: 1427) | GTGCACCGCAGGGGTGAACTCGGCGGGGAGGTGGGCGGCCAGGGTCACCAGCAGGCAGTGGCTT |
| NM_000558_HS_HBA1_r1_5 | /5Biosg/GCCGCCCACTCAGACTTTATTCAAAGACCACGGGGGTACGGGTGCAGGAAGGGGAG |
| (SEQ ID NO: 1428) | GAGGGGCTGGGGGGAGGCCCAAGGGGCAAGAAGCATGGCCACCGAGGCTCCAGCTTAACGGTAT |
| NM_000517_HS_HBA2_r1_1 | /5Biosg/GACCTTACCCCAGGCGGCCTTGACGTTGGTCTTGTCGGCAGGAGACAGCACCATGG |
| (SEQ ID NO: 1429) | TGGGTTCTCTCTGAGTCTGTGGGGACCAGAAGAGTGCCGGCCCGCGAGCGCGCCAGGGTTTATG |
| NM_000517_HS_HBA2_r1_2 | /5Biosg/GGCTCAGGTCGAAGTGCGGGAAGTAGGTCTTGGTGGTGGGGAAGGACAGGAACATC |
| (SEQ ID NO: 1430) | CTCTCCAGGGCCTCCGCACCATACTCGCCAGCGTGCGCGCCGACCTTACCCCAGGCGGCCTTGA |
| NM_000517_HS_HBA2_r1_3 | /5Biosg/GCGGACAGCGCGTTGGGCATGTCGTCCACGTGCGCCACGGCGTTGGTCAGCGCGTC |
| (SEQ ID NO: 1431) | GGCCACCTTCTTGCCGTGGCCCTTAACCTGGGCAGAGCCGTGGCTCAGGTCGAAGTGCGGGAAG |
| NM_000517_HS_HBA2_r1_4 | /5Biosg/GGGAGGTGGGCGGCCAGGGTCACCAGCAGGCAGTGGCTTAGGAGCTTGAAGTTGAC |
| (SEQ ID NO: 1432) | CGGGTCCACCCGAAGCTTGTGCGCGTGCAGGTCGCTCAGGGCGGACAGCGCGTTGGGCATGTCG |
| NM_000517_HS_HBA2_r1_5 | /5Biosg/CGAGGCTCCAGCTTAACGGTATTTGGAGGTCAGCACGGTGCTCACAGAAGCCAGGA |
| (SEQ ID NO: 1433) | ACTTGTCCAGGGAGGCGTGCACCGCAGGGGTGAACTCGGCGGGGAGGTGGGCGGCCAGGGTCAC |
| NM_000517_HS_HBA2_r1_6 | /5Biosg/GCTGCCCACTCAGACTTTATTCAAAGACCAGGAAGGGCCGGTGCAAGGAGGGGAGG |
| (SEQ ID NO: 1434) | AGGGCCCGTTGGGAGGCCCAGCGGGCAGGAGGAACGGCTACCGAGGCTCCAGCTTAACGGTATT |
| NM_000518_HS_HBB_r1_1 | /5Biosg/CTTCATCCACGTTCACCTTGCCCCACAGGGCAGTAACGGCAGACTTCTCCTCAGGA |
| (SEQ ID NO: 1435) | GTCAGATGCACCATGGTGTCTGTTTGAGGTTGCTAGTGAACACAGTTGTGTCAGAAGCAAATGT |
| NM_000518_HS_HBB_r1_2 | /5Biosg/GCCCATAACAGCATCAGGAGTGGACAGATCCCCAAAGGACTCAAAGAACCTCTGGG |
| (SEQ ID NO: 1436) | TCCAAGGGTAGACCACCAGCAGCCTGCCCAGGGCCTCACCACCAACTTCATCCACGTTCACCTT |
| NM_000518_HS_HBB_r1_3 | /5Biosg/TCACTCAGTGTGGCAAAGGTGCCCTTGAGGTTGTCCAGGTGAGCCAGGCCATCACT |
| (SEQ ID NO: 1437) | AAAGGCACCGAGCACTTTCTTGCCATGAGCCTTCACCTTAGGGTTGCCCATAACAGCATCAGGA |
| NM_000518_HS_HBB_r1_4 | /5Biosg/GGGGTGAATTCTTTGCCAAAGTGATGGGCCAGCACACAGACCAGCACGTTGCCCAG |
| (SEQ ID NO: 1438) | GAGCCTGAAGTTCTCAGGATCCACGTGCAGCTTGTCACAGTGCAGCTCACTCAGTGTGGCAAAG |
| NM_000518_HS_HBB_r1_5 | /5Biosg/TTAATAGAAATTGGACAGCAAGAAAGCGAGCTTAGTGATACTTGTGGGCCAGGGCA |
| (SEQ ID NO: 1439) | TTAGCCACACCAGCCACCACTTTCTGATAGGCAGCCTGCACTGGTGGGGTGAATTCTTTGCCAA |
| NM_000518_HS_HBB_r1_6 | /5Biosg/GCAATGAAAATAAATGTTTTTTATTAGGCAGAATCCAGATGCTCAAGGCCCTTCAT |
| (SEQ ID NO: 1440) | AATATCCCCCAGTTTAGTAGTTGGACTTAGGGAACAAAGGAACCTTTAATAGAAATTGGACAGC |
| NM_000519_HS_HBD_r1_1 | /5Biosg/TTTTATGCTGGTCCTGTCCTCCCTGCTCCAGTGAGCAGGTTGGTTTAAGATAAGCA |
| (SEQ ID NO: 1441) | GGGTTTCATTAGTTTGTGAGAATGAAAAATGAACCTTCATTCCACTATTCCCTTAACTTGCCCT |
| NM_000519_HS_HBD_r1_2 | /5Biosg/CAGCAGTCTTCTCCTCAGGAGTCAGATGCACCATGGTGTCTGTTTGAGGTTGCTAG |
| (SEQ ID NO: 1442) | TGAACACTGTTATGTCAGAAGAAAGTGTAAGCAACAGTCGACTCTGCCCTGCCTTTTATGCTGG |
| NM_000519_HS_HBD_r1_3 | /5Biosg/TCCCCAAAGGACTCAAAGAACCTCTGGGTCCAAGGGTAGACCACCAGTAATCTGCC |
| (SEQ ID NO: 1443) | CAGGGCCTCACCACCAACTGCATCCACGTTCACTTTGCCCCACAGGGCATTGACAGCAGTCTTC |
| NM_000519_HS_HBD_r1_4 | /5Biosg/GCCCTTGAGGTTGTCCAGGTGAGCCAGGCCATCACTAAAGGCACCTAGCACCTTCT |
| (SEQ ID NO: 1444) | TGCCATGAGCCTTCACCTTAGGGTTGCCCATAACAGCATCAGGAGAGGACAGATCCCCAAAGGA |
| NM_000519_HS_HBD_r1_5 | /5Biosg/TGCCAAAGTTGCGGGCCAGCACACACACCAGCACATTGCCCAAGAGCCTGAAGTTC |
| (SEQ ID NO: 1445) | TCAGGATCCACGTGCAGCTTGTCACAGTGCAGCTCACTCAGCTGAGAAAAAGTGCCCTTGAGGT |
| NM_000519_HS_HBD_r1_6 | /5Biosg/TGGTTATCAGGAAACAGTCCAGGATCTCAATGGTACTTGTGAGCCAGGGCATTAGC |
| (SEQ ID NO: 1446) | CACACCAGCCACCACCTTCTGATAGGCAGCCTGCATTTGTGGGGTGAATTCCTTGCCAAAGTTG |
| NM_000519_HS_HBD_r1_7 | /5Biosg/ATCAGGAAGTTGAGCTGAACATTCTTTATTAGGCAGAAGCCATACCCTTGAAGTAG |
| (SEQ ID NO: 1447) | GCATTGTGTTCCCAAGTTCAGAAAATAGAATCTAGGGAAATAGGGTCTTCTTATGGTTATCAGG |
| NM_000184_HS_HBG2_r1_1 | /5Biosg/CTTCCACATTCACCTTGCCCCACAGGCTTGTGATAGTAGCCTTGTCCTCCTCTGTG |
| (SEQ ID NO: 1448) | AAATGACCCATGGCGTCTGGACTAGGAGCTTATTGATAACCTCAGACGTTCCAGAAGCGAGTGT |
| NM_000184_HS_HBG2_r1_2 | /5Biosg/GACTTTGGGGTTGCCCATGATGGCAGAGGCAGAGGACAGGTTGCCAAAGCTGTCAA |
| (SEQ ID NO: 1449) | AGAACCTCTGGGTCCATGGGTAGACAACCAGGAGCCTTCCCAGGGTTTCTCCTCCAGCATCTTC |
| NM_000184_HS_HBG2_r1_3 | /5Biosg/CCACATGCAGCTTGTCACAGTGCAGTTCACTCAGCTGGGCAAAGGTGCCCTTGAGA |
| (SEQ ID NO: 1450) | TCATCCAGGTGCTTTATGGCATCTCCCAAGGAAGTCAGCACCTTCTTGCCATGTGCCTTGACTT |
| NM_000184_HS_HBG2_r1_4 | /5Biosg/CACTCCAGTCACCATCTTCTGCCAGGAAGCCTGCACCTCAGGGGTGAATTCTTTGC |
| (SEQ ID NO: 1451) | CGAAATGGATTGCCAAAACGGTCACCAGCACATTTCCCAGGAGCTTGAAGTTCTCAGGATCCAC |
| NM_000184_HS_HBG2_r1_5 | /5Biosg/GTGATCTCTTAGCAGAATAGATTTATTATTTGATTGCTTGCAGAATAAAGCCTATC |
| (SEQ ID NO: 1452) | CTTGAAAGCTCTGCATCATGGGCAGTGAGCTCAGTGGTATCTGGAGGACAGGGCACTGGCCACT |

The application's sequence listing, which the Patent Office published only in electronic form, follows.

SEQUENCE LISTING (1456 sequences)

SEQ ID NO: 1 - DNA, 23 bp, Artificial Sequence
  Description of Artificial Sequence: Synthetic primer
agacccaaactgggattagatac

SEQ ID NO: 2 - DNA, 20 bp, Artificial Sequence
  Description of Artificial Sequence: Synthetic primer
ttaagctgtggctcgtagtg

SEQ ID NO: 3 - DNA, 20 bp, Artificial Sequence
  Description of Artificial Sequence: Synthetic primer
aaagagcacacccgtctatg

SEQ ID NO: 4 - DNA, 21 bp, Artificial Sequence
  Description of Artificial Sequence: Synthetic primer
tcttggacaaccagctatcac

SEQ ID NO: 5 - DNA, 22 bp, Artificial Sequence
  Description of Artificial Sequence: Synthetic primer
gcggtaattccagctccaatag

SEQ ID NO: 6 - DNA, 20 bp, Artificial Sequence
  Description of Artificial Sequence: Synthetic primer
ccgctcccaagatccaacta

SEQ ID NO: 7 - DNA, 21 bp, Artificial Sequence
  Description of Artificial Sequence: Synthetic primer
cgtcgtgagacaggttagttt

SEQ ID NO: 8 - DNA, 19 bp, Artificial Sequence
  Description of Artificial Sequence: Synthetic primer
cctcagccaagcacataca

SEQ ID NO: 9 - DNA, 20 bp, Artificial Sequence
  Description of Artificial Sequence: Synthetic primer
acacccactcctccaccttt

SEQ ID NO: 10 - DNA, 20 bp, Artificial Sequence
  Description of Artificial Sequence: Synthetic primer
tgctgtagccaaattcgttg

SEQ ID NO: 11 - DNA, 5070 bp, Homo sapiens
cgcgacctcagatcagacgtggcgacccgctgaatttaagcatattagtcagcggaggagaagaaactaaccaggattccctcagtaacggcgagtgaacagggaagagcccagcgccgaatccccgccccgcggcggggcgcgggacatgtggcgtacggaagacccgctccccggcgccgctcgtggggggcccaagtccttctgatcgaggcccagcccgtggacggtgtgaggccggtagcggcccccggcgcgccgggcccgggtcttcccggagtcgggttgcttgggaatgcagcccaaagcgggtggtaaactccatctaaggctaaataccggcacgagaccgatagtcaacaagtaccgtaagggaaagttgaaaagaactttgaagagagagttcaagagggcgtgaaaccgttaagaggtaaacgggtggggtccgcgcagtccgcccggaggattcaacccggcggcgggtccggccgtgtcggcggcccggcggatctttcccgccccccgttcctcccgacccctccacccgccctcccttcccccgccgcccctcctcctcctccccggagggggcgggctccggcgggtgcgggggtgggcgggcggggccgggggtggggtcggcgggggaccgtcccccgaccggcgaccggccgccgccgggcgcatttccaccgcggcggtgcgccgcgaccggctccgggacggctgggaaggcccggcggggaaggtggctcggggggccccgtccgtccgtccgtccgtcctcctcctcccccgtctccgccccccggccccgcgtcctccctcgggagggcgcgcgggtcggggcggcggcggcggcggcggtggcggcggcggcggcggcggcgggaccgaaaccccccccgagtgttacagcccccccggcagcagcactcgccgaatcccggggccgagggagcgagacccgtcgccgcgctctcccccctcccggcgcccacccccgcggggaatcccccgcgaggggggtctcccccgcgggggcgcgccggcgtctcctcgtgggggggccgggccacccctcccacggcgcgaccgctctcccacccctcctccccgcgcccccgccccggcgacggggggggtgccgcgcgcgggtcggggggcggggcggactgtccccagtgcgccccgggcgggtcgcgccgtcgggcccgggggaggttctctcggggccacgcgcgcgtcccccgaagagggggacggcggagcgagcgcacggggtcggcggcgacgtcggctacccacccgacccgtcttgaaacacggaccaaggagtctaacacgtgcgcgagtcgggggctcgcacgaaagccgccgtggcgcaatgaaggtgaaggccggcgcgctcgccggccgaggtgggatcccgaggcctctccagtccgccgagggcgcaccaccggcccgtctcgcccgccgcgccggggaggtggagcacgagcgcacgtgttaggacccgaaagatggtgaactatgcctgggcagggcgaagccagaggaaactctggtggaggtccgtagcggtcctgacgtgcaaatcggtcgtccgacctgggtataggggcgaaagactaatcgaaccatctagtagctggttccctccgaagtttccctcaggatagctggcgctctcgcagacccgacgcacccccgccacgcagttttatccggtaaagcgaatgattagaggtcttggggccgaaacgatctcaacctattctcaaactttaaatgggtaagaagcccggctcgctggcgtggagccgggcgtggaatgcgagtgcctagtgggccacttttggtaagcagaactggcgctgcgggatgaaccgaacgccgggttaaggcgcccgatgccgacgctcatcagaccccagaaaaggtgttggttgatatagacagcaggacggtggccatggaagtcggaatccgctaaggagtgtgtaacaactcacctgccgaatcaactagccctgaaaatggatggcgctggagcgtcgggcccatacccggccgtcgccggcagtcgagagtggacgggagcggcgggggcggcgcgcgcgcgcgcgcgtgtggtgtgcgtcggagggcggcggcggcggcggcggcgggggtgtggggtccttcccccgcccccccccccacgcctcctcccctcctcccgcccacgccccgctccccgcccccggagccccgcggacgctacgccgcgacgagtaggagggccgctgcggtgagccttgaagcctagggcgcgggcccgggtggagccgccgcaggtgcagatcttggtggtagtagcaaatattcaaacgagaactttgaaggccgaagtggagaagggttccatgtgaacagcagttgaacatgggtcagtcggtcctgagagatgggcgagcgccgttccgaagggacgggcgatggcctccgttgccctcggccgatcgaaagggagtcgggttcagatccccgaatccggagtggcggagatgggcgccgcgaggcgtccagtgcggtaacgcgaccgatcccggagaagccggcgggagccccggggagagttctcttttctttgtgaagggcagggcgccctggaatgggttcgccccgagagaggggcccgtgccttggaaagcgtcgcggttccggcggcgtccggtgagctctcgctggcccttgaaaatccgggggagagggtgtaaatctcgcgccgggccgtacccatatccgcagcaggtctccaaggtgaacagcctctggcatgttggaacaatgtaggtaagggaagtcggcaagccggatccgtaacttcgggataaggattggctctaagggctgggtcggtcgggctggggcgcgaagcggggctgggcgcgcgccgcggctggacgaggcgccgccgccccccccacgcccggggcacccccctcgcggccctcccccgccccaccccgcgcgcgccgctcgctccctccccgccccgcgccctctctctctctctctcccccgctccccgtcctcccccctccccgggggagcgccgcgtgggggcggcggcggggggagaagggtcggggcggcaggggccggcggcggcccgccgcggggccccggcggcgggggcacggtcccccgcgaggggggcccgggcacccggggggccggcggcggcggcgactctggacgcgagccgggcccttcccgtggatcgccccagctgcggcgggcgtcgcggccgcccccggggagcccggcgggcgccggcgcgcccccccccccaccccacgtctcgtcgcgcgcgcgtccgctgggggcggggagcggtcgggcggcggcggtcggcgggcggcggggcggggcggttcgtccccccgccctacccccccggccccgtccgccccccgttcccccctcctcctcggcgcgcggcggcggcggcggcaggcggcggaggggccgcgggccggtcccccccgccgggtccgcccccggggccgcggttccgcgcggcgcctcgcctcggccggcgcctagcagccgacttagaactggtgcggaccaggggaatccgactgtttaattaaaacaaagcatcgcgaaggcccgcggcgggtgttgacgcgatgtgatttctgcccagtgctctgaatgtcaaagtgaagaaattcaatgaagcgcgggtaaacggcgggagtaactatgactctcttaaggtagccaaatgcctcgtcatctaattagtgacgcgcatgaatggatgaacgagattcccactgtccctacctactatccagcgaaaccacagccaagggaacgggcttggcggaatcagcggggaaagaagaccctgttgagcttgactctagtctggcacggtgaagagacatgagaggtgtagaataagtgggaggcccccggcgcccccccggtgtccccgcgaggggcccggggcggggtccgccggccctgcgggccgccggtgaaataccactactctgatcgttttttcactgacccggtgaggcgggggggcgagccccgaggggctctcgcttctggcgccaagcgcccggccgcgcgccggccgggcgcgacccgctccggggacagtgccaggtggggagtttgactggggcggtacacctgtcaaacggtaacgcaggtgtcctaaggcgagctcagggaggacagaaacctcccgtggagcagaagggcaaaagctcgcttgatcttgattttcagtacgaatacagaccgtgaaagcggggcctcacgatccttctgaccttttgggttttaagcaggaggtgtcagaaaagttaccacagggataactggcttgtggcggccaagcgttcatagcgacgtcgctttttgatccttcgatgtcggctcttcctatcattgtgaagcagaattcaccaagcgttggattgttcacccactaatagggaacgtgagctgggtttagaccgtcgtgagacaggttagttttaccctactgatgatgtgttgttgccatggtaatcctgctcagtacgagaggaaccgcaggttcagacatttggtgtatgtgcttggctgaggagccaatggggcgaagctaccatctgtgggattatgactgaacgcctctaagtcagaatcccgcccaggcggaacgatacggcagcgccgcggagcctcggttggcctcggatagccggtcccccgcctgtccccgccggcgggccgccccccccctccacgcgccccgcgcgcgcgggagggcgcgtgccccgccgcgcgccgggaccggggtccggtgcggagtgcccttcgtcctgggaaacggggcgcggccggagaggcggccgccccctcgcccgtcacgcaccgcacgttcgtggggaacctggcgctaaaccattcgtagacgacctgcttctgggtcggggtttcgtacgtagcagagcagctccctcgctgcgatctattgaaagtcagccctcgacacaagggtttgtc

SEQ ID NO: 12 - DNA, 1869 bp, Homo sapiens
tacctggttgatcctgccagtagcatatgcttgtctcaaagattaagccatgcatgtctgagtacgcacggccggtacagtgaaactgcgaatggctcattaaatcagttatggttcctttggtcgctcgctcctctcctacttggataactgtggtaattctagagctaatacatgccgacgggcgctgacccccttcgcgggggggatgcgtgcatttatcagatcaaaaccaacccggtcagcccctctccggccccggccggggggcgggcgccggcggctttggtgactctagataacctcgggccgatcgcacgccccccgtggcggcgacgacccattcgaacgtctgccctatcaactttcgatggtagtcgccgtgcctaccatggtgaccacgggtgacggggaatcagggttcgattccggagagggagcctgagaaacggctaccacatccaaggaaggcagcaggcgcgcaaattacccactcccgacccggggaggtagtgacgaaaaataacaatacaggactctttcgaggccctgtaattggaatgagtccactttaaatcctttaacgaggatccattggagggcaagtctggtgccagcagccgcggtaattccagctccaatagcgtatattaaagttgctgcagttaaaaagctcgtagttggatcttgggagcgggcgggcggtccgccgcgaggcgagccaccgcccgtccccgccccttgcctctcggcgccccctcgatgctcttagctgagtgtcccgcggggcccgaagcgtttactttgaaaaaattagagtgttcaaagcaggcccgagccgcctggataccgcagctaggaataatggaataggaccgcggttctattttgttggttttcggaactgaggccatgattaagagggacggccgggggcattcgtattgcgccgctagaggtgaaattcttggaccggcgcaagacggaccagagcgaaagcatttgccaagaatgttttcattaatcaagaacgaaagtcggaggttcgaagacgatcagataccgtcgtagttccgaccataaacgatgccgaccggcgatgcggcggcgttattcccatgacccgccgggcagcttccgggaaaccaaagtctttgggttccggggggagtatggttgcaaagctgaaacttaaaggaattgacggaagggcaccaccaggagtggagcctgcggcttaatttgactcaacacgggaaacctcacccggcccggacacggacaggattgacagattgatagctctttctcgattccgtgggtggtggtgcatggccgttcttagttggtggagcgatttgtctggttaattccgataacgaacgagactctggcatgctaactagttacgcgacccccgagcggtcggcgtcccccaacttcttagagggacaagtggcgttcagccacccgagattgagcaataacaggtctgtgatgcccttagatgtccggggctgcacgcgcgctacactgactggctcagcgtgtgcctaccctacgccggcaggcgcgggtaacccgttgaaccccattcgtgatggggatcggggattgcaattattccccatgaacgaggaattcccagtaagtgcgggtcataagcttgcgttgattaagtccctgccctttgtacacaccgcccgtcgctactaccgattggatggtttagtgaggccctcggatcggccccgccggggtcggcccacggccctggcggagcgctgagaagacggtcgaacttgactatctagaggaagtaaaagtcgtaacaaggtttccgtaggtgaacctgcggaaggatcatta

SEQ ID NO: 13 - DNA, 121 bp, Homo sapiens
gtctacggccataccaccctgaacgcgcccgatctcgtctgatctcggaagctaagcagggtcgggcctggttagtacttggatgggagaccgcctgggaataccgggtgctgtaggcttt

SEQ ID NO: 14 - DNA, 156 bp, Homo sapiens
gactcttagcggtggatcactcggctcgtgcgtcgatgaagaacgcagctagctgcgagaattaatgtgaattgcaggacacattgatcatcgacacttcgaacgcacttgcggccccgggttcctcccggggctacgcctgtctgagcgtcgctt

SEQ ID NO: 15 - DNA, 1558 bp, Homo sapiens
gctaaacctagccccaaacccactccaccttactaccagacaaccttaaccaaaccatttacccaaataaagtataggcgatagaaattgaaacctggcgcaatagatatagtaccgcaagggaaagatgaaaaattataaccaagcataatatagcaaggactaacccctataccttctgcataatgaattaactagaaataactttgcaaggagagccaaagctaagacccccgaaaccagacgagctacctaagaacagctaaaagagcacacccgtctatgtagcaaaatagtgggaagatttataggtagaggcgacaaacctaccgagcctggtgatagctggttgtccaagatagaatcttagttcaactttaaatttgcccacagaaccctctaaatccccttgtaaatttaactgttagtccaaagaggaacagctctttggacactaggaaaaaaccttgtagagagagtaaaaaatttaacacccatagtaggcctaaaagcagccaccaattaagaaagcgttcaagctcaacacccactacctaaaaaatcccaaacatataactgaactcctcacacccaattggaccaatctatcaccctatagaagaactaatgttagtataagtaacatgaaaacattctcctccgcataagcctgcgtcagattaaaacactgaactgacaattaacagcccaatatctacaatcaaccaacaagtcattattaccctcactgtcaacccaacacaggcatgctcataaggaaaggttaaaaaaagtaaaaggaactcggcaaatcttaccccgcctgtttaccaaaaacatcacctctagcatcaccagtattagaggcaccgcctgcccagtgacacatgtttaacggccgcggtaccctaaccgtgcaaaggtagcataatcacttgttccttaaatagggacctgtatgaatggctccacgagggttcagctgtctcttacttttaaccagtgaaattgacctgcccgtgaagaggcgggcatgacacagcaagacgagaagaccctatggagctttaatttattaatgcaaacagtacctaacaaacccacaggtcctaaactaccaaacctgcattaaaaatttcggttggggcgacctcggagcagaacccaacctccgagcagtacatgctaagacttcaccagtcaaagcgaactactatactcaattgatccaataacttgaccaacggaacaagttaccctagggataacagcgcaatcctattctagagtccatatcaacaatagggtttacgacctcgatgttggatcaggacatcccgatggtgcagccgctattaaaggttcgtttgttcaacgattaaagtcctacgtgatctgagttcagaccggagtaatccaggtcggtttctatctacttcaaattcctccctgtacgaaaggacaagagaaataaggcctacttcacaaagcgccttcccccgtaaatgatatcatctcaacttagtattatacccacacccacccaagaacagggttt

SEQ ID NO: 16 - DNA, 953 bp, Homo sapiens
aataggtttggtcctagcctttctattagctcttagtaagattacacatgcaagcatccccgttccagtgagttcaccctctaaatcaccacgatcaaaagggacaagcatcaagcacgcagcaatgcagctcaaaacgcttagcctagccacacccccacgggaaacagcagtgattaacctttagcaataaacgaaagtttaactaagctatactaaccccagggttggtcaatttcgtgccagccaccgcggtcacacgattaacccaagtcaatagaagccggcgtaaagagtgttttagatcaccccctccccaataaagctaaaactcacctgagttgtaaaaaactccagttgacacaaaatagactacgaaagtggctttaacatatctgaacacacaatagctaagacccaaactgggattagataccccactatgcttagccctaaacctcaacagttaaatcaacaaaactgctcgccagaacactacgagccacagcttaaaactcaaaggacctggcggtgcttcatatccctctagaggagcctgttctgtaatcgataaaccccgatcaacctcaccacctcttgctcagcctatataccgccatcttcagcaaaccctgatgaaggctacaaagtaagcgcaagtacccacgtaaagacgttaggtcaaggtgtagcccatgaggtggcaagaaatgggctacattttctaccccagaaaactacgatagcccttatgaaacttaagggtcgaaggtggatttagcagtaaactgagagtagagtgcttagttgaacagggccctgaagcgcgtacacaccgcccgtcaccctcctcaagtatacttcaaaggacatttaactaaaacccctacgcatttatatagaggagacaagtcgtaacatggtaagtgtactggaaagtgcacttggacgaa

SEQ ID NO: 17 - DNA, 120 bp, Artificial Sequence
  Description of Artificial Sequence: Synthetic polynucleotide
gcgtgcttgatgcttgtcccttttgatcgtggtgatttagagggtgaactcactggaacggggatgcttgcatgtgtaatcttactaagagctaatagaaaggctaggaccaaacctatt

SEQ ID NO: 18 - DNA, 120 bp, Artificial Sequence
  Description of Artificial Sequence: Synthetic polynucleotide
gaaattgaccaaccctggggttagtatagcttagttaaactttcgtttattgctaaaggttaatcactgctgtttcccgtgggggtgtggctaggctaagcgttttgagctgcattgctg

SEQ ID NO: 19 - DNA, 120 bp, Artificial Sequence
  Description of Artificial Sequence: Synthetic polynucleotide
actggagttttttacaactcaggtgagttttagctttattggggagggggtgatctaaaacactctttacgccggcttctattgacttgggttaatcgtgtgaccgcggtggctggcacg

SEQ ID NO: 20 - DNA, 120 bp, Artificial Sequence
  Description of Artificial Sequence: Synthetic polynucleotide
tgttgatttaactgttgaggtttagggctaagcatagtggggtatctaatcccagtttgggtcttagctattgtgtgttcagatatgttaaagccactttcgtagtctattttgtgtcaa

SEQ ID NO: 21 - DNA, 120 bp, Artificial Sequence
  Description of Artificial Sequence: Synthetic polynucleotide
gaggtggtgaggttgatcggggtttatcgattacagaacaggctcctctagagggatatgaagcaccgccaggtcctttgagttttaagctgtggctcgtagtgttctggcgagcagttt

SEQ ID NO: 22 - DNA, 120 bp, Artificial Sequence
  Description of Artificial Sequence: Synthetic polynucleotide
gcccatttcttgccacctcatgggctacaccttgacctaacgtctttacgtgggtacttgcgcttactttgtagccttcatcagggtttgctgaagatggcggtatataggctgagcaag

SEQ ID NO: 23 - DNA, 120 bp, Artificial Sequence
  Description of Artificial Sequence: Synthetic polynucleotide
tgtgtacgcgcttcagggccctgttcaactaagcactctactctcagtttactgctaaatccaccttcgacccttaagtttcataagggctatcgtagttttctggggtagaaaatgtag

SEQ ID NO: 24 - DNA, 120 bp, Artificial Sequence
  Description of Artificial Sequence: Synthetic polynucleotide
gttcgtccaagtgcactttccagtacacttaccatgttacgacttgtctcctctatataaatgcgtaggggttttagttaaatgtcctttgaagtatacttgaggagggtgacgggcggt

SEQ ID NO: 25 - DNA, 120 bp, Artificial Sequence
  Description of Artificial Sequence: Synthetic polynucleotide
ttgcggtactatatctattgcgccaggtttcaatttctatcgcctatactttatttgggtaaatggtttggttaaggttgtctggtagtaaggtggagtgggtttggggctaggtttagc

SEQ ID NO: 26 - DNA, 120 bp, Artificial Sequence
  Description of Artificial Sequence: Synthetic polynucleotide
gtttcgggggtcttagctttggctctccttgcaaagttatttctagttaattcattatgcagaaggtataggggttagtccttgctatattatgcttggttataatttttcatctttccc

SEQ ID NO: 27 - DNA, 120 bp, Artificial Sequence
  Description of Artificial Sequence: Synthetic polynucleotide
atcttggacaaccagctatcaccaggctcggtaggtttgtcgcctctacctataaatcttcccactattttgctacatagacgggtgtgctcttttagctgttcttaggtagctcgtctg

SEQ ID NO: 28 - DNA, 120 bp, Artificial Sequence
  Description of Artificial Sequence: Synthetic polynucleotide
ctctctctacaaggttttttcctagtgtccaaagagctgttcctctttggactaacagttaaatttacaaggggatttagagggttctgtgggcaaatttaaagttgaactaagattcta

SEQ ID NO: 29 - DNA, 120 bp, Artificial Sequence
  Description of Artificial Sequence: Synthetic polynucleotide
ccaattgggtgtgaggagttcagttatatgtttgggattttttaggtagtgggtgttgagcttgaacgctttcttaattggtggctgcttttaggcctactatgggtgttaaatttttta

SEQ ID NO: 30 - DNA, 120 bp, Artificial Sequence
  Description of Artificial Sequence: Synthetic polynucleotide
gtagatattgggctgttaattgtcagttcagtgttttaatctgacgcaggcttatgcggaggagaatgttttcatgttacttatactaacattagttcttctatagggtgatagattggt

SEQ ID NO: 31 - DNA, 120 bp, Artificial Sequence
  Description of Artificial Sequence: Synthetic polynucleotide
tgtttttggtaaacaggcggggtaagatttgccgagttccttttactttttttaacctttccttatgagcatgcctgtgttgggttgacagtgagggtaataatgacttgttggttgatt

SEQ ID NO: 32 - DNA, 120 bp, Artificial Sequence
  Description of Artificial Sequence: Synthetic polynucleotide
tacaggtccctatttaaggaacaagtgattatgctacctttgcacggttagggtaccgcggccgttaaacatgtgtcactgggcaggcggtgcctctaatactggtgatgctagaggtga

SEQ ID NO: 33 - DNA, 120 bp, Artificial Sequence
  Description of Artificial Sequence: Synthetic polynucleotide
ttaataaattaaagctccatagggtcttctcgtcttgctgtgtcatgcccgcctcttcacgggcaggtcaatttcactggttaaaagtaagagacagctgaaccctcgtggagccattca

SEQ ID NO: 34 - DNA, 120 bp, Artificial Sequence
  Description of Artificial Sequence: Synthetic polynucleotide
tggtgaagtcttagcatgtactgctcggaggttgggttctgctccgaggtcgccccaaccgaaatttttaatgcaggtttggtagtttaggacctgtgggtttgttaggtactgtttgca

SEQ ID NO: 35 - DNA, 120 bp, Artificial Sequence
  Description of Artificial Sequence: Synthetic polynucleotide
gaggtcgtaaaccctattgttgatatggactctagaataggattgcgctgttatccctagggtaacttgttccgttggtcaagttattggatcaattgagtatagtagttcgctttgact

SEQ ID NO: 36 - DNA, 120 bp, Artificial Sequence
  Description of Artificial Sequence: Synthetic polynucleotide
aagtagatagaaaccgacctggattactccggtctgaactcagatcacgtaggactttaatcgttgaacaaacgaacctttaatagcggctgcaccatcgggatgtcctgatccaacatc

SEQ ID NO: 37 - DNA, 120 bp, Artificial Sequence
  Description of Artificial Sequence: Synthetic polynucleotide
aaaccctgttcttgggtgggtgtgggtataatactaagttgagatgatatcatttacgggggaaggcgctttgtgaagtaggccttatttctcttgtcctttcgtacagggaggaatttg

SEQ ID NO: 38 - DNA, 120 bp, Artificial Sequence
  Description of Artificial Sequence: Synthetic polynucleotide
aaggaaccataactgatttaatgagccattcgcagtttcactgtaccggccgtgcgtactcagacatgcatggcttaatctttgagacaagcatatgctactggcaggatcaaccaggta

SEQ ID NO: 39 - DNA, 120 bp, Artificial Sequence
  Description of Artificial Sequence: Synthetic polynucleotide
gacgttcgaatgggtcgtcgccgccacggggggcgtgcgatcggcccgaggttatctagagtcaccaaagccgccggcgcccgccccccggccggggccggagaggggctgaccgggttg

SEQ ID NO: 40 - DNA, 120 bp, Artificial Sequence
  Description of Artificial Sequence: Synthetic polynucleotide
cttccttggatgtggtagccgtttctcaggctccctctccggaatcgaaccctgattccccgtcacccgtggtcaccatggtaggcacggcgactaccatcgaaagttgatagggcagac

SEQ ID NO: 41 - DNA, 120 bp, Artificial Sequence
  Description of Artificial Sequence: Synthetic polynucleotide
cgttaaaggatttaaagtggactcattccaattacagggcctcgaaagagtcctgtattgttatttttcgtcactacctccccgggtcgggagtgggtaatttgcgcgcctgctgccttc

SEQ ID NO: 42 - DNA, 120 bp, Artificial Sequence
  Description of Artificial Sequence: Synthetic polynucleotide
gcccgcccgctcccaagatccaactacgagctttttaactgcagcaactttaatatacgctattggagctggaattaccgcggctgctggcaccagacttgccctccaatggatcctcgt

SEQ ID NO: 43 - DNA, 120 bp, Artificial Sequence
  Description of Artificial Sequence: Synthetic polynucleotide
actctaattttttcaaagtaaacgcttcgggccccgcgggacactcagctaagagcatcgagggggcgccgagaggcaaggggcggggacgggcggtggctcgcctcgcggcggaccgcc

SEQ ID NO: 44 - DNA, 120 bp, Artificial Sequence
  Description of Artificial Sequence: Synthetic polynucleotide
cccccggccgtccctcttaatcatggcctcagttccgaaaaccaacaaaatagaaccgcggtcctattccattattcctagctgcggtatccaggcggctcgggcctgctttgaacactc

SEQ ID NO: 45 - DNA, 120 bp, Artificial Sequence
  Description of Artificial Sequence: Synthetic polynucleotide
gtcttcgaacctccgactttcgttcttgattaatgaaaacattcttggcaaatgctttcgctctggtccgtcttgcgccggtccaagaatttcacctctagcggcgcaatacgaatgccc

SEQ ID NO: 46 - DNA, 120 bp, Artificial Sequence
  Description of Artificial Sequence: Synthetic polynucleotide
ccccccggaacccaaagactttggtttcccggaagctgcccggcgggtcatgggaataacgccgccgcatcgccggtcggcatcgtttatggtcggaactacgacggtatctgatcgtct

SEQ ID NO: 47 - DNA, 120 bp, Artificial Sequence
  Description of Artificial Sequence: Synthetic polynucleotide
cctgtccgtgtccgggccgggtgaggtttcccgtgttgagtcaaattaagccgcaggctccactcctggtggtgcccttccgtcaattcctttaagtttcagctttgcaaccatactccc

SEQ ID NO: 48 - DNA, 120 bp, Artificial Sequence
  Description of Artificial Sequence: Synthetic polynucleotide
gttagcatgccagagtctcgttcgttatcggaattaaccagacaaatcgctccaccaactaagaacggccatgcaccaccacccacggaatcgagaaagagctatcaatctgtcaatcct

SEQ ID NO: 49 - DNA, 120 bp, Artificial Sequence
  Description of Artificial Sequence: Synthetic polynucleotide
agccccggacatctaagggcatcacagacctgttattgctcaatctcgggtggctgaacgccacttgtccctctaagaagttgggggacgccgaccgctcgggggtcgcgtaactagtta

SEQ ID NO: 50 - DNA, 120 bp, Artificial Sequence
  Description of Artificial Sequence: Synthetic polynucleotide
cgttcatggggaataattgcaatccccgatccccatcacgaatggggttcaacgggttacccgcgcctgccggcgtagggtaggcacacgctgagccagtcagtgtagcgcgcgtgcagc

SEQ ID NO: 51 - DNA, 120 bp, Artificial Sequence
  Description of Artificial Sequence: Synthetic polynucleotide
gggccgatccgagggcctcactaaaccatccaatcggtagtagcgacgggcggtgtgtacaaagggcagggacttaatcaacgcaagcttatgacccgcacttactgggaattcctcgtt

SEQ ID NO: 52 - DNA, 120 bp, Artificial Sequence
  Description of Artificial Sequence: Synthetic polynucleotide
taatgatccttccgcaggttcacctacggaaaccttgttacgacttttacttcctctagatagtcaagttcgaccgtcttctcagcgctccgccagggccgtgggccgaccccggcgggg

SEQ ID NO: 53 - DNA, 120 bp, Artificial Sequence
  Description of Artificial Sequence: Synthetic polynucleotide
tcggcgctgggctcttccctgttcactcgccgttactgagggaatcctggttagtttcttctcctccgctgactaatatgcttaaattcagcgggtcgccacgtctgatctgaggtcgcg

SEQ ID NO: 54 - DNA, 120 bp, Artificial Sequence
  Description of Artificial Sequence: Synthetic polynucleotide
tccacgggctgggcctcgatcagaaggacttgggccccccacgagcggcgccggggagcgggtcttccgtacgccacatgtcccgcgccccgccgcggggcggggattcggcgctgggct

SEQ ID NO: 55 - DNA, 120 bp, Artificial Sequence
  Description of Artificial Sequence: Synthetic polynucleotide
tagccttagatggagtttaccacccgctttgggctgcattcccaagcaacccgactccgggaagacccgggcccggcgcgccgggggccgctaccggcctcacaccgtccacgggctggg

SEQ ID NO: 56 - DNA, 120 bp, Artificial Sequence
  Description of Artificial Sequence: Synthetic polynucleotide
cacccgtttacctcttaacggtttcacgccctcttgaactctctcttcaaagttcttttcaactttcccttacggtacttgttgactatcggtctcgtgccggtatttagccttagatgg

SEQ ID NO: 57 - DNA, 120 bp, Artificial Sequence
  Description of Artificial Sequence: Synthetic polynucleotide
cgggtggaggggtcgggaggaacggggggcgggaaagatccgccgggccgccgacacggccggacccgccgccgggttgaatcctccgggcggactgcgcggaccccacccgtttacctc

SEQ ID NO: 58 - DNA, 120 bp, Artificial Sequence
  Description of Artificial Sequence: Synthetic polynucleotide
gacggtcccccgccgaccccacccccggccccgcccgcccacccccgcacccgccggagcccgccccctccggggaggaggaggaggggcggcgggggaagggagggcgggtggaggggt

SEQ ID NO: 59 - DNA, 120 bp, Artificial Sequence
  Description of Artificial Sequence: Synthetic polynucleotide
ccccccgagccaccttccccgccgggccttcccagccgtcccggagccggtcgcggcgcaccgccgcggtggaaatgcgcccggcggcggccggtcgccggtcgggggacggtcccccgc

SEQ ID NO: 60 - DNA, 120 bp, Artificial Sequence
  Description of Artificial Sequence: Synthetic polynucleotide
accgccgccgccgccgccgccccgacccgcgcgccctcccgagggaggacgcggggccggggggcggagacgggggaggaggaggacggacggacggacggacggggccccccgagccac

SEQ ID NO: 61 - DNA, 120 bp, Artificial Sequence
  Description of Artificial Sequence: Synthetic polynucleotide
gaggggggagagcgcggcgacgggtctcgctccctcggccccgggattcggcgagtgctgctgccgggggggctgtaacactcggggggggtttcggtcccgccgccgccgccgccgccg

SEQ ID NO: 62 - DNA, 120 bp, Artificial Sequence
  Description of Artificial Sequence: Synthetic polynucleotide
ggggtgggagagcggtcgcgccgtgggaggggtggcccggcccccccacgaggagacgccggcgcgcccccgcgggggagacccccctcgcgggggattccccgcgggggtgggcgccgg

SEQ ID NO: 63 - DNA, 120 bp, Artificial Sequence
  Description of Artificial Sequence: Synthetic polynucleotide
agagaacctcccccgggcccgacggcgcgacccgcccggggcgcactggggacagtccgccccgccccccgacccgcgcgcggcaccccccccgtcgccggggcgggggcgcggggagga

SEQ ID NO: 64 - DNA, 120 bp, Artificial Sequence
  Description of Artificial Sequence: Synthetic polynucleotide
gcacgtgttagactccttggtccgtgtttcaagacgggtcgggtgggtagccgacgtcgccgccgaccccgtgcgctcgctccgccgtccccctcttcgggggacgcgcgcgtggccccg

SEQ ID NO: 65 - DNA, 120 bp, Artificial Sequence
  Description of Artificial Sequence: Synthetic polynucleotide
cgggccggtggtgcgccctcggcggactggagaggcctcgggatcccacctcggccggcgagcgcgccggccttcaccttcattgcgccacggcggctttcgtgcgagcccccgactcgc

SEQ ID NO: 66 - DNA, 120 bp, Artificial Sequence
  Description of Artificial Sequence: Synthetic polynucleotide
ggaccgctacggacctccaccagagtttcctctggcttcgccctgcccaggcatagttcaccatctttcgggtcctaacacgtgcgctcgtgctccacctccccggcgcggcgggcgaga

SEQ ID NO: 67 - DNA, 120 bp, Artificial Sequence
  Description of Artificial Sequence: Synthetic polynucleotide
tgcgtcgggtctgcgagagcgccagctatcctgagggaaacttcggagggaaccagctactagatggttcgattagtctttcgcccctatacccaggtcggacgaccgatttgcacgtca

SEQ ID NO: 68 - DNA, 120 bp, Artificial Sequence
  Description of Artificial Sequence: Synthetic polynucleotide
ccggctccacgccagcgagccgggcttcttacccatttaaagtttgagaataggttgagatcgtttcggccccaagacctctaatcattcgctttaccggataaaactgcgtggcggggg

SEQ ID NO: 69 - DNA, 120 bp, Artificial Sequence
  Description of Artificial Sequence: Synthetic polynucleotide
aacaccttttctggggtctgatgagcgtcggcatcgggcgccttaacccggcgttcggttcatcccgcagcgccagttctgcttaccaaaagtggcccactaggcactcgcattccacgc

SEQ ID NO: 70 - DNA, 120 bp, Artificial Sequence
  Description of Artificial Sequence: Synthetic polynucleotide
atgggcccgacgctccagcgccatccattttcagggctagttgattcggcaggtgagttgttacacactccttagcggattccgacttccatggccaccgtcctgctgtctatatcaacc

SEQ ID NO: 71 - DNA, 120 bp, Artificial Sequence
  Description of Artificial Sequence: Synthetic polynucleotide
gaaggaccccacacccccgccgccgccgccgccgccgccctccgacgcacaccacacgcgcgcgcgcgcgcgccgcccccgccgctcccgtccactctcgactgccggcgacggccgggt

SEQ ID NO: 72 - DNA, 120 bp, Artificial Sequence
  Description of Artificial Sequence: Synthetic polynucleotide
gcttcaaggctcaccgcagcggccctcctactcgtcgcggcgtagcgtccgcggggctccgggggcggggagcggggcgtgggcgggaggaggggaggaggcgtgggggggggggcgggg

SEQ ID NO: 73 - DNA, 120 bp, Artificial Sequence
  Description of Artificial Sequence: Synthetic polynucleotide
gttcaactgctgttcacatggaacccttctccacttcggccttcaaagttctcgtttgaatatttgctactaccaccaagatctgcacctgcggcggctccacccgggcccgcgccctag

SEQ ID NO: 74 - DNA, 120 bp, Artificial Sequence
  Description of Artificial Sequence: Synthetic polynucleotide
ccgccactccggattcggggatctgaacccgactccctttcgatcggccgagggcaacggaggccatcgcccgtcccttcggaacggcgctcgcccatctctcaggaccgactgacccat

SEQ ID NO: 75 - DNA, 120 bp, Artificial Sequence
  Description of Artificial Sequence: Synthetic polynucleotide
ggcgaacccattccagggcgccctgcccttcacaaagaaaagagaactctccccggggctcccgccggcttctccgggatcggtcgcgttaccgcactggacgcctcgcggcgcccatct

SEQ ID NO: 76 - DNA, 120 bp, Artificial Sequence
  Description of Artificial Sequence: Synthetic polynucleotide
atatgggtacggcccggcgcgagatttacaccctctcccccggattttcaagggccagcgagagctcaccggacgccgccggaaccgcgacgctttccaaggcacgggcccctctctcgg

SEQ ID NO: 77 - DNA, 120 bp, Artificial Sequence
  Description of Artificial Sequence: Synthetic polynucleotide
cgaccgacccagcccttagagccaatccttatcccgaagttacggatccggcttgccgacttcccttacctacattgttccaacatgccagaggctgttcaccttggagacctgctgcgg

SEQ ID NO: 78 - DNA, 120 bp, Artificial Sequence
  Description of Artificial Sequence: Synthetic polynucleotide
cgagcggcgcgcgcggggtggggcgggggagggccgcgaggggggtgccccgggcgtggggggggcggcggcgcctcgtccagccgcggcgcgcgcccagccccgcttcgcgccccagcc

SEQ ID NO: 79 - DNA, 120 bp, Artificial Sequence
  Description of Artificial Sequence: Synthetic polynucleotide
gcccctgccgccccgacccttctccccccgccgccgcccccacgcggcgctcccccggggaggggggaggacggggagcgggggagagagagagagagagggcgcggggcggggagggag

SEQ ID NO: 80 - DNA, 120 bp, Artificial Sequence
  Description of Artificial Sequence: Synthetic polynucleotide
ccacgggaagggcccggctcgcgtccagagtcgccgccgccgccggccccccgggtgcccgggcccccctcgcgggggaccgtgcccccgccgccggggccccgcggcgggccgccgccg

SEQ ID NO: 81 - DNA, 120 bp, Artificial Sequence
  Description of Artificial Sequence: Synthetic polynucleotide
cgaccgctccccgcccccagcggacgcgcgcgcgacgagacgtggggtgggggggggggcgcgccggcgcccgccgggctccccgggggcggccgcgacgcccgccgcagctggggcgat

SEQ ID NO: 82 - DNA, 120 bp, Artificial Sequence
  Description of Artificial Sequence: Synthetic polynucleotide
cgcctgccgccgccgccgccgcgcgccgaggaggaggggggaacggggggcggacggggccgggggggtagggcggggggacgaaccgccccgccccgccgcccgccgaccgccgccgcc

SEQ ID NO: 83 - DNA, 120 bp, Artificial Sequence
  Description of Artificial Sequence: Synthetic polynucleotide
ttcccctggtccgcaccagttctaagtcggctgctaggcgccggccgaggcgaggcgccgcgcggaaccgcggccccgggggcggacccggcgggggggaccggcccgcggcccctccgc

SEQ ID NO: 84 - DNA, 120 bp, Artificial Sequence
  Description of Artificial Sequence: Synthetic polynucleotide
cgtttacccgcgcttcattgaatttcttcactttgacattcagagcactgggcagaaatcacatcgcgtcaacacccgccgcgggccttcgcgatgctttgttttaattaaacagtcgga

SEQ ID NO: 85 - DNA, 120 bp, Artificial Sequence
  Description of Artificial Sequence: Synthetic polynucleotide
ggctgtggtttcgctggatagtaggtagggacagtgggaatctcgttcatccattcatgcgcgtcactaattagatgacgaggcatttggctaccttaagagagtcatagttactcccgc

SEQ ID NO: 86 - DNA, 120 bp, Artificial Sequence
  Description of Artificial Sequence: Synthetic polynucleotide
gggggggcgccgggggcctcccacttattctacacctctcatgtctcttcaccgtgccagactagagtcaagctcaacagggtcttctttccccgctgattccgccaagcccgttccctt

SEQ ID NO: 87 - DNA, 120 bp, Artificial Sequence
  Description of Artificial Sequence: Synthetic polynucleotide
gcccctcggggctcgcccccccgcctcaccgggtcagtgaaaaaacgatcagagtagtggtatttcaccggcggcccgcagggccggcggaccccgccccgggcccctcgcggggacacc

SEQ ID NO: 88 - DNA, 120 bp, Artificial Sequence
  Description of Artificial Sequence: Synthetic polynucleotide
gacacctgcgttaccgtttgacaggtgtaccgccccagtcaaactccccacctggcactgtccccggagcgggtcgcgcccggccggcgcgcggccgggcgcttggcgccagaagcgaga

SEQ ID NO: 89 - DNA, 120 bp, Artificial Sequence
  Description of Artificial Sequence: Synthetic polynucleotide
ggtcagaaggatcgtgaggccccgctttcacggtctgtattcgtactgaaaatcaagatcaagcgagcttttgcccttctgctccacgggaggtttctgtcctccctgagctcgccttag

SEQ ID NO: 90 - DNA, 120 bp, Artificial Sequence
  Description of Artificial Sequence: Synthetic polynucleotide
caatgataggaagagccgacatcgaaggatcaaaaagcgacgtcgctatgaacgcttggccgccacaagccagttatccctgtggtaacttttctgacacctcctgcttaaaacccaaaa

SEQ ID NO: 91 - DNA, 120 bp, Artificial Sequence
  Description of Artificial Sequence: Synthetic polynucleotide
ttaccatggcaacaacacatcatcagtagggtaaaactaacctgtctcacgacggtctaaacccagctcacgttccctattagtgggtgaacaatccaacgcttggtgaattctgcttca

SEQ ID NO: 92 - DNA, 120 bp, Artificial Sequence
  Description of Artificial Sequence: Synthetic polynucleotide
gattctgacttagaggcgttcagtcataatcccacagatggtagcttcgccccattggctcctcagccaagcacatacaccaaatgtctgaacctgcggttcctctcgtactgagcagga

SEQ ID NO: 93 - DNA, 120 bp, Artificial Sequence
  Description of Artificial Sequence: Synthetic polynucleotide
tcccgcgcgcgcggggcgcgtggagggggggggcggcccgccggcggggacaggcgggggaccggctatccgaggccaaccgaggctccgcggcgctgccgtatcgttccgcctgggcgg

SEQ ID NO: 94 - DNA, 120 bp, Artificial Sequence
  Description of Artificial Sequence: Synthetic polynucleotide
acgaacgtgcggtgcgtgacgggcgagggggcggccgcctctccggccgcgccccgtttcccaggacgaagggcactccgcaccggaccccggtcccggcgcgcggcggggcacgcgccc

SEQ ID NO: 95 - DNA, 120 bp, Artificial Sequence
  Description of Artificial Sequence: Synthetic polynucleotide
gacaaacccttgtgtcgagggctgactttcaatagatcgcagcgagggagctgctctgctacgtacgaaaccccgacccagaagcaggtcgtctacgaatggtttagcgccaggttcccc

SEQ ID NO: 96 - DNA, 120 bp, Artificial Sequence
  Description of Artificial Sequence: Synthetic polynucleotide
cttccaccacatcgggcccgctcggagcagggagtgctccgaggcgtcagggcccagggcccacgatcctgggacgccctccggtcctccgccctgtcgcggaggcagcgttttggatcc

SEQ ID NO: 97 - DNA, 120 bp, Artificial Sequence
  Description of Artificial Sequence: Synthetic polynucleotide
ccgccggattgcagccgacaccgccagcccggggccgcggggctcggatcggggacccccgagccgctggcccgcggccttcccccggctcccgcgctcccgagcttccaccacatcggg

SEQ ID NO: 98 - DNA, 120 bp, Artificial Sequence
  Description of Artificial Sequence: Synthetic polynucleotide
agcttccgagatcagacgagatcgggcgcgttcagggtggtatggccgtagacgctgaaggaggcgcctggctgccccaagagcccagccccgcccggccgtgcccgccggattgcagcc

SEQ ID NO: 99 - DNA, 120 bp, Artificial Sequence
  Description of Artificial Sequence: Synthetic polynucleotide
ggaagaaaaggaaagaaacagcaaaaagccaaagaaaaagcctacagcacccggtattcccaggcggtctcccatccaagtactaaccaggcccgaccctgcttagcttccgagatcaga

SEQ ID NO: 100 - DNA, 120 bp, Artificial Sequence
  Description of Artificial Sequence: Synthetic polynucleotide
gaggctgaggccggggaatggcgtggacccgggaggcggagcttgcagtgagccgagatggcgccaccgcactccagcctgggcgacagggcgagactccgtctggaagaaaaggaaaga

SEQ ID NO: 101 - DNA, 120 bp, Artificial Sequence
  Description of Artificial Sequence: Synthetic polynucleotide
gagctccagaccatcccggctaacagggtgaaagcccgtctctaggaaaaatagaacaaagtagccgggcgtggtggcgggcgcctgtaggcccagctactcgggaggctgaggccgggg

SEQ ID NO: 102 - DNA, 120 bp, Artificial Sequence
  Description of Artificial Sequence: Synthetic polynucleotide
ccggggccgcaagtgcgttcgaagtgtcgatgatcaatgtgtcctgcaattcacattaattctcgcagctagctgcgttcttcatcgacgcacgagccgagtgatccaccgctaagagtc

SEQ ID NO: 103 - DNA, 120 bp, Artificial Sequence
  Description of Artificial Sequence: Synthetic polynucleotide
aagcgacgctcagacaggcgtagccccgggaggaacccggggccgcaagtgcgttcgaagtgtcgatgatcaatgtgtcctgcaattcacattaattctcgcagctagctgcgttcttca

SEQ ID NO: 104 - DNA, 120 bp, Artificial Sequence; identical to SEQ ID NO: 17
  Description of Artificial Sequence: Synthetic polynucleotide

SEQ ID NO: 105 - DNA, 120 bp, Artificial Sequence; identical to SEQ ID NO: 18
  Description of Artificial Sequence: Synthetic polynucleotide

SEQ ID NO: 106 - DNA, 120 bp, Artificial Sequence; identical to SEQ ID NO: 19
  Description of Artificial Sequence: Synthetic polynucleotide

SEQ ID NO: 107 - DNA, 120 bp, Artificial Sequence; identical to SEQ ID NO: 20
  Description of Artificial Sequence: Synthetic polynucleotide

SEQ ID NO: 108 - DNA, 120 bp, Artificial Sequence; identical to SEQ ID NO: 21
  Description of Artificial Sequence: Synthetic polynucleotide

SEQ ID NO: 109 - DNA, 120 bp, Artificial Sequence; identical to SEQ ID NO: 22
  Description of Artificial Sequence: Synthetic polynucleotide

SEQ ID NO: 110 - DNA, 120 bp, Artificial Sequence; identical to SEQ ID NO: 23
  Description of Artificial Sequence: Synthetic polynucleotide

SEQ ID NO: 111 - DNA, 120 bp, Artificial Sequence; identical to SEQ ID NO: 24
  Description of Artificial Sequence: Synthetic polynucleotide

SEQ ID NO: 112 - DNA, 120 bp, Artificial Sequence; identical to SEQ ID NO: 25
  Description of Artificial Sequence: Synthetic polynucleotide

SEQ ID NO: 113 - DNA, 120 bp, Artificial Sequence; identical to SEQ ID NO: 26
  Description of Artificial Sequence: Synthetic polynucleotide

SEQ ID NO: 114 - DNA, 120 bp, Artificial Sequence; identical to SEQ ID NO: 27
  Description of Artificial Sequence: Synthetic polynucleotide

SEQ ID NO: 115 - DNA, 120 bp, Artificial Sequence; identical to SEQ ID NO: 28
  Description of Artificial Sequence: Synthetic polynucleotide

SEQ ID NO: 116 - DNA, 120 bp, Artificial Sequence; identical to SEQ ID NO: 29
  Description of Artificial Sequence: Synthetic polynucleotide

SEQ ID NO: 117 - DNA, 120 bp, Artificial Sequence; identical to SEQ ID NO: 30
  Description of Artificial Sequence: Synthetic polynucleotide

SEQ ID NO: 118 - DNA, 120 bp, Artificial Sequence; identical to SEQ ID NO: 31
  Description of Artificial Sequence: Synthetic polynucleotide

SEQ ID NO: 119 - DNA, 120 bp, Artificial Sequence; identical to SEQ ID NO: 32
  Description of Artificial Sequence: Synthetic polynucleotide

SEQ ID NO: 120 - DNA, 120 bp, Artificial Sequence; identical to SEQ ID NO: 33
  Description of Artificial Sequence: Synthetic polynucleotide

SEQ ID NO: 121 - DNA, 120 bp, Artificial Sequence; identical to SEQ ID NO: 34
  Description of Artificial Sequence: Synthetic polynucleotide

SEQ ID NO: 122 - DNA, 120 bp, Artificial Sequence; identical to SEQ ID NO: 35
  Description of Artificial Sequence: Synthetic polynucleotide

SEQ ID NO: 123 - DNA, 120 bp, Artificial Sequence; identical to SEQ ID NO: 36
  Description of Artificial Sequence: Synthetic polynucleotide

SEQ ID NO: 124 - DNA, 120 bp, Artificial Sequence; identical to SEQ ID NO: 37
  Description of Artificial Sequence: Synthetic polynucleotide

SEQ ID NO: 125 - DNA, 120 bp, Artificial Sequence; identical to SEQ ID NO: 38
  Description of Artificial Sequence: Synthetic polynucleotide

SEQ ID NO: 126 - DNA, 120 bp, Artificial Sequence
  Description of Artificial Sequence: Synthetic polynucleotide
gttggttttgatctgataaatgcacgcatcccccccgcgaagggggtcagcgcccgtcggcatgtattagctctagaattaccacagttatccaagtaggagaggagcgagcgaccaaag

SEQ ID NO: 127 - DNA, 120 bp, Artificial Sequence; identical to SEQ ID NO: 39
  Description of Artificial Sequence: Synthetic polynucleotide

SEQ ID NO: 128 - DNA, 120 bp, Artificial Sequence; identical to SEQ ID NO: 40
  Description of Artificial Sequence: Synthetic polynucleotide

SEQ ID NO: 129 - DNA, 120 bp, Artificial Sequence; identical to SEQ ID NO: 41
  Description of Artificial Sequence: Synthetic polynucleotide

SEQ ID NO: 130 - DNA, 120 bp, Artificial Sequence; identical to SEQ ID NO: 42
  Description of Artificial Sequence: Synthetic polynucleotide

SEQ ID NO: 131 - DNA, 120 bp, Artificial Sequence; identical to SEQ ID NO: 43
  Description of Artificial Sequence: Synthetic polynucleotide

SEQ ID NO: 132 - DNA, 120 bp, Artificial Sequence; identical to SEQ ID NO: 44
  Description of Artificial Sequence: Synthetic polynucleotide

SEQ ID NO: 133 - DNA, 120 bp, Artificial Sequence; identical to SEQ ID NO: 45
  Description of Artificial Sequence: Synthetic polynucleotide

SEQ ID NO: 134 - DNA, 120 bp, Artificial Sequence; identical to SEQ ID NO: 46
  Description of Artificial Sequence: Synthetic polynucleotide

SEQ ID NO: 135 - DNA, 120 bp, Artificial Sequence; identical to SEQ ID NO: 47
  Description of Artificial Sequence: Synthetic polynucleotide

SEQ ID NO: 136 - DNA, 120 bp, Artificial Sequence; identical to SEQ ID NO: 48
  Description of Artificial Sequence: Synthetic polynucleotide

SEQ ID NO: 137 - DNA, 120 bp, Artificial Sequence; identical to SEQ ID NO: 49
  Description of Artificial Sequence: Synthetic polynucleotide

SEQ ID NO: 138 - DNA, 120 bp, Artificial Sequence; identical to SEQ ID NO: 50
  Description of Artificial Sequence: Synthetic polynucleotide

SEQ ID NO: 139 - DNA, 120 bp, Artificial Sequence; identical to SEQ ID NO: 51
  Description of Artificial Sequence: Synthetic polynucleotide

SEQ ID NO: 140 - DNA, 120 bp, Artificial Sequence; identical to SEQ ID NO: 52
  Description of Artificial Sequence: Synthetic polynucleotide

SEQ ID NO: 141 - DNA, 120 bp, Artificial Sequence; identical to SEQ ID NO: 53
  Description of Artificial Sequence: Synthetic polynucleotide

SEQ ID NO: 142 - DNA, 120 bp, Artificial Sequence; identical to SEQ ID NO: 54
  Description of Artificial Sequence: Synthetic polynucleotide

SEQ ID NO: 143 - DNA, 120 bp, Artificial Sequence; identical to SEQ ID NO: 55
  Description of Artificial Sequence: Synthetic polynucleotide

SEQ ID NO: 144 - DNA, 120 bp, Artificial Sequence; identical to SEQ ID NO: 56
  Description of Artificial Sequence: Synthetic polynucleotide

SEQ ID NO: 145 - DNA, 120 bp, Artificial Sequence; identical to SEQ ID NO: 57
  Description of Artificial Sequence: Synthetic polynucleotide

SEQ ID NO: 146 - DNA, 120 bp, Artificial Sequence; identical to SEQ ID NO: 59
  Description of Artificial Sequence: Synthetic polynucleotide

SEQ ID NO: 147 - DNA, 120 bp, Artificial Sequence; identical to SEQ ID NO: 61
  Description of Artificial Sequence: Synthetic polynucleotide

SEQ ID NO: 148 - DNA, 120 bp, Artificial Sequence; identical to SEQ ID NO: 64
  Description of Artificial Sequence: Synthetic polynucleotide

SEQ ID NO: 149 - DNA, 120 bp, Artificial Sequence; identical to SEQ ID NO: 65
  Description of Artificial Sequence: Synthetic polynucleotide

SEQ ID NO: 150 - DNA, 120 bp, Artificial Sequence; identical to SEQ ID NO: 66
  Description of Artificial Sequence: Synthetic polynucleotide

SEQ ID NO: 151 - DNA, 120 bp, Artificial Sequence; identical to SEQ ID NO: 67
  Description of Artificial Sequence: Synthetic polynucleotide

SEQ ID NO: 152 - DNA, 120 bp, Artificial Sequence; identical to SEQ ID NO: 68
  Description of Artificial Sequence: Synthetic polynucleotide

SEQ ID NO: 153 - DNA, 120 bp, Artificial Sequence; identical to SEQ ID NO: 69
  Description of Artificial Sequence: Synthetic polynucleotide

SEQ ID NO: 154 - DNA, 120 bp, Artificial Sequence; identical to SEQ ID NO: 70
  Description of Artificial Sequence: Synthetic polynucleotide

SEQ ID NO: 155 - DNA, 120 bp, Artificial Sequence; identical to SEQ ID NO: 71
  Description of Artificial Sequence: Synthetic polynucleotide

SEQ ID NO: 156 - DNA, 120 bp, Artificial Sequence; identical to SEQ ID NO: 72
  Description of Artificial Sequence: Synthetic polynucleotide

SEQ ID NO: 157 - DNA, 120 bp, Artificial Sequence; identical to SEQ ID NO: 73
  Description of Artificial Sequence: Synthetic polynucleotide

SEQ ID NO: 158 - DNA, 120 bp, Artificial Sequence; identical to SEQ ID NO: 74
  Description of Artificial Sequence: Synthetic polynucleotide

SEQ ID NO: 159 - DNA, 120 bp, Artificial Sequence; identical to SEQ ID NO: 75
  Description of Artificial Sequence: Synthetic polynucleotide

SEQ ID NO: 160 - DNA, 120 bp, Artificial Sequence; identical to SEQ ID NO: 76
  Description of Artificial Sequence: Synthetic polynucleotide

SEQ ID NO: 161 - DNA, 120 bp, Artificial Sequence; identical to SEQ ID NO: 77
  Description of Artificial Sequence: Synthetic polynucleotide

SEQ ID NO: 162 - DNA, 120 bp, Artificial Sequence; identical to SEQ ID NO: 79
  Description of Artificial Sequence: Synthetic polynucleotide

SEQ ID NO: 163 - DNA, 120 bp, Artificial Sequence; identical to SEQ ID NO: 83
  Description of Artificial Sequence: Synthetic polynucleotide

SEQ ID NO: 164 - DNA, 120 bp, Artificial Sequence; identical to SEQ ID NO: 84
  Description of Artificial Sequence: Synthetic polynucleotide

SEQ ID NO: 165 - DNA, 120 bp, Artificial Sequence; identical to SEQ ID NO: 85
  Description of Artificial Sequence: Synthetic polynucleotide

SEQ ID NO: 166 - DNA, 120 bp, Artificial Sequence; identical to SEQ ID NO: 86
  Description of Artificial Sequence: Synthetic polynucleotide

SEQ ID NO: 167 - DNA, 120 bp, Artificial Sequence; identical to SEQ ID NO: 87
  Description of Artificial Sequence: Synthetic polynucleotide

SEQ ID NO: 168 - DNA, 120 bp, Artificial Sequence; identical to SEQ ID NO: 88
  Description of Artificial Sequence: Synthetic polynucleotide

SEQ ID NO: 169 - DNA, 120 bp, Artificial Sequence; identical to SEQ ID NO: 89
  Description of Artificial Sequence: Synthetic polynucleotide

SEQ ID NO: 170 - DNA, 120 bp, Artificial Sequence; identical to SEQ ID NO: 90
  Description of Artificial Sequence: Synthetic polynucleotide

SEQ ID NO: 171 - DNA, 120 bp, Artificial Sequence; identical to SEQ ID NO: 91
  Description of Artificial Sequence: Synthetic polynucleotide

SEQ ID NO: 172 - DNA, 120 bp, Artificial Sequence; identical to SEQ ID NO: 92
  Description of Artificial Sequence: Synthetic polynucleotide

SEQ ID NO: 173 - DNA, 120 bp, Artificial Sequence; identical to SEQ ID NO: 93
  Description of Artificial Sequence: Synthetic polynucleotide

SEQ ID NO: 174 - DNA, 120 bp, Artificial Sequence; identical to SEQ ID NO: 94
  Description of Artificial Sequence: Synthetic polynucleotide

SEQ ID NO: 175 - DNA, 120 bp, Artificial Sequence; identical to SEQ ID NO: 95
  Description of Artificial Sequence: Synthetic polynucleotide

SEQ ID NO: 176 - DNA, 120 bp, Artificial Sequence; identical to SEQ ID NO: 96
  Description of Artificial Sequence: Synthetic polynucleotide

SEQ ID NO: 177 - DNA, 120 bp, Artificial Sequence; identical to SEQ ID NO: 97
  Description of Artificial Sequence: Synthetic polynucleotide

SEQ ID NO: 178 - DNA, 120 bp, Artificial Sequence; identical to SEQ ID NO: 98
  Description of Artificial Sequence: Synthetic polynucleotide

SEQ ID NO: 179 - DNA, 120 bp, Artificial Sequence; identical to SEQ ID NO: 99
  Description of Artificial Sequence: Synthetic polynucleotide

SEQ ID NO: 180 - DNA, 120 bp, Artificial Sequence; identical to SEQ ID NO: 100
  Description of Artificial Sequence: Synthetic polynucleotide

SEQ ID NO: 181 - DNA, 120 bp, Artificial Sequence; identical to SEQ ID NO: 101
  Description of Artificial Sequence: Synthetic polynucleotide

SEQ ID NO: 182 - DNA, 120 bp, Artificial Sequence; identical to SEQ ID NO: 102
  Description of Artificial Sequence: Synthetic polynucleotide

SEQ ID NO: 183 - DNA, 120 bp, Artificial Sequence; identical to SEQ ID NO: 103
  Description of Artificial Sequence: Synthetic polynucleotide

SEQ ID NO: 184 - DNA, 120 bp, Artificial Sequence; identical to SEQ ID NO: 17
  Description of Artificial Sequence: Synthetic polynucleotide

SEQ ID NO: 185 - DNA, 120 bp, Artificial Sequence
  Description of Artificial Sequence: Synthetic polynucleotide
ttaatcactgctgtttcccgtgggggtgtggctaggctaagcgttttgagctgcattgctgcgtgcttgatgcttgtcccttttgatcgtggtgatttagagggtgaactcactggaacg

SEQ ID NO: 186 - DNA, 120 bp, Artificial Sequence; identical to SEQ ID NO: 18
  Description of Artificial Sequence: Synthetic polynucleotide

SEQ ID NO: 187 - DNA, 120 bp, Artificial Sequence
  Description of Artificial Sequence: Synthetic polynucleotide
acactctttacgccggcttctattgacttgggttaatcgtgtgaccgcggtggctggcacgaaattgaccaaccctggggttagtatagcttagttaaactttcgtttattgctaaaggt

SEQ ID NO: 188 - DNA, 120 bp, Artificial Sequence; identical to SEQ ID NO: 19
  Description of Artificial Sequence: Synthetic polynucleotide

SEQ ID NO: 189 - DNA, 120 bp, Artificial Sequence
  Description of Artificial Sequence: Synthetic polynucleotide
ggtcttagctattgtgtgttcagatatgttaaagccactttcgtagtctattttgtgtcaactggagttttttacaactcaggtgagttttagctttattggggagggggtgatctaaaa

SEQ ID NO: 190 - DNA, 120 bp, Artificial Sequence; identical to SEQ ID NO: 20
  Description of Artificial Sequence: Synthetic polynucleotide

SEQ ID NO: 191 - DNA, 120 bp, Artificial Sequence
  Description of Artificial Sequence: Synthetic polynucleotide
aagcaccgccaggtcctttgagttttaagctgtggctcgtagtgttctggcgagcagttttgttgatttaactgttgaggtttagggctaagcatagtggggtatctaatcccagtttgg

SEQ ID NO: 192 - DNA, 120 bp, Artificial Sequence; identical to SEQ ID NO: 21
  Description of Artificial Sequence: Synthetic polynucleotide

SEQ ID NO: 193 - DNA, 120 bp, Artificial Sequence
  Description of Artificial Sequence: Synthetic polynucleotide
cgcttactttgtagccttcatcagggtttgctgaagatggcggtatataggctgagcaagaggtggtgaggttgatcggggtttatcgattacagaacaggctcctctagagggatatga

SEQ ID NO: 194 - DNA, 120 bp, Artificial Sequence; identical to SEQ ID NO: 22
  Description of Artificial Sequence: Synthetic polynucleotide

SEQ ID NO: 195 - DNA, 120 bp, Artificial Sequence
  Description of Artificial Sequence: Synthetic polynucleotide
ccaccttcgacccttaagtttcataagggctatcgtagttttctggggtagaaaatgtagcccatttcttgccacctcatgggctacaccttgacctaacgtctttacgtgggtacttgc

SEQ ID NO: 196 - DNA, 120 bp, Artificial Sequence; identical to SEQ ID NO: 23
  Description of Artificial Sequence: Synthetic polynucleotide

SEQ ID NO: 197 - DNA, 120 bp, Artificial Sequence
  Description of Artificial Sequence: Synthetic polynucleotide
atgcgtaggggttttagttaaatgtcctttgaagtatacttgaggagggtgacgggcggtgtgtacgcgcttcagggccctgttcaactaagcactctactctcagtttactgctaaatc

SEQ ID NO: 198 - DNA, 120 bp, Artificial Sequence; identical to SEQ ID NO: 24
  Description of Artificial Sequence: Synthetic polynucleotide

SEQ ID NO: 199 - DNA, 120 bp, Artificial Sequence; identical to SEQ ID NO: 25
  Description of Artificial Sequence: Synthetic polynucleotide

SEQ ID NO: 200 - DNA, 120 bp, Artificial Sequence
  Description of Artificial Sequence: Synthetic polynucleotide
agaaggtataggggttagtccttgctatattatgcttggttataatttttcatctttcccttgcggtactatatctattgcgccaggtttcaatttctatcgcctatactttatttgggt

SEQ ID NO: 201 - DNA, 120 bp, Artificial Sequence; identical to SEQ ID NO: 26
  Description of Artificial Sequence: Synthetic polynucleotide

SEQ ID NO: 202 - DNA, 120 bp, Artificial Sequence
  Description of Artificial Sequence: Synthetic polynucleotide
cccactattttgctacatagacgggtgtgctcttttagctgttcttaggtagctcgtctggtttcgggggtcttagctttggctctccttgcaaagttatttctagttaattcattatgc

SEQ ID NO: 203 - DNA, 120 bp, Artificial Sequence; identical to SEQ ID NO: 27
  Description of Artificial Sequence: Synthetic polynucleotide

SEQ ID NO: 204 - DNA, 120 bp, Artificial Sequence
  Description of Artificial Sequence: Synthetic polynucleotide
taaatttacaaggggatttagagggttctgtgggcaaatttaaagttgaactaagattctatcttggacaaccagctatcaccaggctcggtaggtttgtcgcctctacctataaatctt

SEQ ID NO: 205 - DNA, 120 bp, Artificial Sequence; identical to SEQ ID NO: 28
  Description of Artificial Sequence: Synthetic polynucleotide

SEQ ID NO: 206 - DNA, 120 bp, Artificial Sequence
  Description of Artificial Sequence: Synthetic polynucleotide
cttgaacgctttcttaattggtggctgcttttaggcctactatgggtgttaaattttttactctctctacaaggttttttcctagtgtccaaagagctgttcctctttggactaacagtt

SEQ ID NO: 207 - DNA, 120 bp, Artificial Sequence; identical to SEQ ID NO: 29
  Description of Artificial Sequence: Synthetic polynucleotide

SEQ ID NO: 208 - DNA, 120 bp, Artificial Sequence
  Description of Artificial Sequence: Synthetic polynucleotide
ggagaatgttttcatgttacttatactaacattagttcttctatagggtgatagattggtccaattgggtgtgaggagttcagttatatgtttgggattttttaggtagtgggtgttgag

SEQ ID NO: 209 - DNA, 120 bp, Artificial Sequence; identical to SEQ ID NO: 30
  Description of Artificial Sequence: Synthetic polynucleotide

SEQ ID NO: 210 - DNA, 120 bp, Artificial Sequence
  Description of Artificial Sequence: Synthetic polynucleotide
ccttatgagcatgcctgtgttgggttgacagtgagggtaataatgacttgttggttgattgtagatattgggctgttaattgtcagttcagtgttttaatctgacgcaggcttatgcgga

SEQ ID NO: 211 - DNA, 120 bp, Artificial Sequence; identical to SEQ ID NO: 31
  Description of Artificial Sequence: Synthetic polynucleotide

SEQ ID NO: 212 - DNA, 120 bp, Artificial Sequence
  Description of Artificial Sequence: Synthetic polynucleotide
gccgttaaacatgtgtcactgggcaggcggtgcctctaatactggtgatgctagaggtgatgtttttggtaaacaggcggggtaagatttgccgagttccttttactttttttaaccttt

SEQ ID NO: 213 - DNA, 120 bp, Artificial Sequence; identical to SEQ ID NO: 32
  Description of Artificial Sequence: Synthetic polynucleotide

SEQ ID NO: 214 - DNA, 120 bp, Artificial Sequence
  Description of Artificial Sequence: Synthetic polynucleotide
gggcaggtcaatttcactggttaaaagtaagagacagctgaaccctcgtggagccattcatacaggtccctatttaaggaacaagtgattatgctacctttgcacggttagggtaccgcg

SEQ ID NO: 215 - DNA, 120 bp, Artificial Sequence; identical to SEQ ID NO: 33
  Description of Artificial Sequence: Synthetic polynucleotide

SEQ ID NO: 216 - DNA, 120 bp, Artificial Sequence
  Description of Artificial Sequence: Synthetic polynucleotide
gaaatttttaatgcaggtttggtagtttaggacctgtgggtttgttaggtactgtttgcattaataaattaaagctccatagggtcttctcgtcttgctgtgtcatgcccgcctcttcac

SEQ ID NO: 217 - DNA, 120 bp, Artificial Sequence
  Description of Artificial Sequence: Synthetic polynucleotide
ggtgaagtcttagcatgtactgctcggaggttgggttctgctccgaggtcgccccaaccgaaatttttaatgcaggtttggtagtttaggacctgtgggtttgttaggtactgtttgcat

SEQ ID NO: 218 - DNA, 120 bp, Artificial Sequence
  Description of Artificial Sequence: Synthetic polynucleotide
ggtaacttgttccgttggtcaagttattggatcaattgagtatagtagttcgctttgactggtgaagtcttagcatgtactgctcggaggttgggttctgctccgaggtcgccccaaccg

SEQ ID NO: 219 - DNA, 120 bp, Artificial Sequence; identical to SEQ ID NO: 35
  Description of Artificial Sequence: Synthetic polynucleotide

SEQ ID NO: 220 - DNA, 120 bp, Artificial Sequence
  Description of Artificial Sequence: Synthetic polynucleotide
tcgttgaacaaacgaacctttaatagcggctgcaccatcgggatgtcctgatccaacatcgaggtcgtaaaccctattgttgatatggactctagaataggattgcgctgttatccctag

SEQ ID NO: 221 - DNA, 120 bp, Artificial Sequence; identical to SEQ ID NO: 36
  Description of Artificial Sequence: Synthetic polynucleotide

SEQ ID NO: 222 - DNA, 120 bp, Artificial Sequence
  Description of Artificial Sequence: Synthetic polynucleotide
ggaaggcgctttgtgaagtaggccttatttctcttgtcctttcgtacagggaggaatttgaagtagatagaaaccgacctggattactccggtctgaactcagatcacgtaggactttaa

SEQ ID NO: 223 - DNA, 120 bp, Artificial Sequence; identical to SEQ ID NO: 37
  Description of Artificial Sequence: Synthetic polynucleotide

SEQ ID NO: 224 - DNA, 120 bp, Artificial Sequence; identical to SEQ ID NO: 38
  Description of Artificial Sequence: Synthetic polynucleotide

SEQ ID NO: 225 - DNA, 120 bp, Artificial Sequence
  Description of Artificial Sequence: Synthetic polynucleotide
gcatgtattagctctagaattaccacagttatccaagtaggagaggagcgagcgaccaaaggaaccataactgatttaatgagccattcgcagtttcactgtaccggccgtgcgtactca

SEQ ID NO: 226 - DNA, 120 bp, Artificial Sequence; identical to SEQ ID NO: 126
  Description of Artificial Sequence: Synthetic polynucleotide

SEQ ID NO: 227 - DNA, 120 bp, Artificial Sequence
  Description of Artificial Sequence: Synthetic polynucleotide
gagtcaccaaagccgccggcgcccgccccccggccggggccggagaggggctgaccgggttggttttgatctgataaatgcacgcatcccccccgcgaagggggtcagcgcccgtcggca

SEQ ID NO: 228 - DNA, 120 bp, Artificial Sequence; identical to SEQ ID NO: 39
  Description of Artificial Sequence: Synthetic polynucleotide

SEQ ID NO: 229 - DNA, 120 bp, Artificial Sequence
  Description of Artificial Sequence: Synthetic polynucleotide
ccgtcacccgtggtcaccatggtaggcacggcgactaccatcgaaagttgatagggcagacgttcgaatgggtcgtcgccgccacggggggcgtgcgatcggcccgaggttatctagagt

SEQ ID NO: 230 - DNA, 120 bp, Artificial Sequence; identical to SEQ ID NO: 40
  Description of Artificial Sequence: Synthetic polynucleotide

SEQ ID NO: 231 - DNA, 120 bp, Artificial Sequence
  Description of Artificial Sequence: Synthetic polynucleotide
tgttatttttcgtcactacctccccgggtcgggagtgggtaatttgcgcgcctgctgccttccttggatgtggtagccgtttctcaggctccctctccggaatcgaaccctgattccccg

SEQ ID NO: 232 - DNA, 120 bp, Artificial Sequence; identical to SEQ ID NO: 41
  Description of Artificial Sequence: Synthetic polynucleotide

SEQ ID NO: 233 - DNA, 120 bp, Artificial Sequence
  Description of Artificial Sequence: Synthetic polynucleotide
gctattggagctggaattaccgcggctgctggcaccagacttgccctccaatggatcctcgttaaaggatttaaagtggactcattccaattacagggcctcgaaagagtcctgtattgt

SEQ ID NO: 234 - DNA, 120 bp, Artificial Sequence; identical to SEQ ID NO: 42
  Description of Artificial Sequence: Synthetic polynucleotide

SEQ ID NO: 235 - DNA, 120 bp, Artificial Sequence
  Description of Artificial Sequence: Synthetic polynucleotide
gagggggcgccgagaggcaaggggcggggacgggcggtggctcgcctcgcggcggaccgcccgcccgctcccaagatccaactacgagctttttaactgcagcaactttaatatacgcta

SEQ ID NO: 236 - DNA, 120 bp, Artificial Sequence; identical to SEQ ID NO: 43
  Description of Artificial Sequence: Synthetic polynucleotide

SEQ ID NO: 237 - DNA, 120 bp, Artificial Sequence
  Description of Artificial Sequence: Synthetic polynucleotide
cggtcctattccattattcctagctgcggtatccaggcggctcgggcctgctttgaacactctaattttttcaaagtaaacgcttcgggccccgcgggacactcagctaagagcatcgag

SEQ ID NO: 238 - DNA, 120 bp, Artificial Sequence; identical to SEQ ID NO: 44
  Description of Artificial Sequence: Synthetic polynucleotide

SEQ ID NO: 239 - DNA, 120 bp, Artificial Sequence
  Description of Artificial Sequence: Synthetic polynucleotide
gctctggtccgtcttgcgccggtccaagaatttcacctctagcggcgcaatacgaatgcccccggccgtccctcttaatcatggcctcagttccgaaaaccaacaaaatagaaccgcggt

SEQ ID NO: 240 - DNA, 120 bp, Artificial Sequence; identical to SEQ ID NO: 45
  Description of Artificial Sequence: Synthetic polynucleotide

SEQ ID NO: 241 - DNA, 120 bp, Artificial Sequence
  Description of Artificial Sequence: Synthetic polynucleotide
acgccgccgcatcgccggtcggcatcgtttatggtcggaactacgacggtatctgatcgtcttcgaacctccgactttcgttcttgattaatgaaaacattcttggcaaatgctttcgct

SEQ ID NO: 242 - DNA, 120 bp, Artificial Sequence; identical to SEQ ID NO: 46
  Description of Artificial Sequence: Synthetic polynucleotide

SEQ ID NO: 243 - DNA, 120 bp, Artificial Sequence
  Description of Artificial Sequence: Synthetic polynucleotide
tccactcctggtggtgcccttccgtcaattcctttaagtttcagctttgcaaccatactccccccggaacccaaagactttggtttcccggaagctgcccggcgggtcatgggaataacg

SEQ ID NO: 244 - DNA, 120 bp, Artificial Sequence; identical to SEQ ID NO: 47
  Description of Artificial Sequence: Synthetic polynucleotide

SEQ ID NO: 245 - DNA, 120 bp, Artificial Sequence
  Description of Artificial Sequence: Synthetic polynucleotide
taagaacggccatgcaccaccacccacggaatcgagaaagagctatcaatctgtcaatcctgtccgtgtccgggccgggtgaggtttcccgtgttgagtcaaattaagccgcaggctcca

SEQ ID NO: 246 - DNA, 120 bp, Artificial Sequence; identical to SEQ ID NO: 48
  Description of Artificial Sequence: Synthetic polynucleotide

SEQ ID NO: 247 - DNA, 120 bp, Artificial Sequence
  Description of Artificial Sequence: Synthetic polynucleotide
cgccacttgtccctctaagaagttgggggacgccgaccgctcgggggtcgcgtaactagttagcatgccagagtctcgttcgttatcggaattaaccagacaaatcgctccaccaactaa

SEQ ID NO: 248 - DNA, 120 bp, Artificial Sequence; identical to SEQ ID NO: 49
  Description of Artificial Sequence: Synthetic polynucleotide

SEQ ID NO: 249 - DNA, 120 bp, Artificial Sequence
  Description of Artificial Sequence: Synthetic polynucleotide
cccgcgcctgccggcgtagggtaggcacacgctgagccagtcagtgtagcgcgcgtgcagccccggacatctaagggcatcacagacctgttattgctcaatctcgggtggctgaacgcc

SEQ ID NO: 250 - DNA, 120 bp, Artificial Sequence; identical to SEQ ID NO: 50
  Description of Artificial Sequence: Synthetic polynucleotide

SEQ ID NO: 251 - DNA, 120 bp, Artificial Sequence
  Description of Artificial Sequence: Synthetic polynucleotide
acaaagggcagggacttaatcaacgcaagcttatgacccgcacttactgggaattcctcgttcatggggaataattgcaatccccgatccccatcacgaatggggttcaacgggttaccc

SEQ ID NO: 252 - DNA, 120 bp, Artificial Sequence; identical to SEQ ID NO: 51
  Description of Artificial Sequence: Synthetic polynucleotide

SEQ ID NO: 253 - DNA, 120 bp, Artificial Sequence
  Description of Artificial Sequence: Synthetic polynucleotide
gatagtcaagttcgaccgtcttctcagcgctccgccagggccgtgggccgaccccggcggggccgatccgagggcctcactaaaccatccaatcggtagtagcgacgggcggtgtgtaca

SEQ ID NO: 254 - DNA, 120 bp, Artificial Sequence; identical to SEQ ID NO: 52
  Description of Artificial Sequence: Synthetic polynucleotide

SEQ ID NO: 255 - DNA, 120 bp, Artificial Sequence; identical to SEQ ID NO: 53
  Description of Artificial Sequence: Synthetic polynucleotide

SEQ ID NO: 256 - DNA, 120 bp, Artificial Sequence
  Description of Artificial Sequence: Synthetic polynucleotide
gccggggagcgggtcttccgtacgccacatgtcccgcgccccgccgcggggcggggattcggcgctgggctcttccctgttcactcgccgttactgagggaatcctggttagtttcttct

SEQ ID NO: 257 - DNA, 120 bp, Artificial Sequence
  Description of Artificial Sequence: Synthetic polynucleotide
tcacaccgtccacgggctgggcctcgatcagaaggacttgggccccccacgagcggcgccggggagcgggtcttccgtacgccacatgtcccgcgccccgccgcggggcggggattcggc

SEQ ID NO: 258 - DNA, 120 bp, Artificial Sequence
  Description of Artificial Sequence: Synthetic polynucleotide
ccaagcaacccgactccgggaagacccgggcccggcgcgccgggggccgctaccggcctcacaccgtccacgggctgggcctcgatcagaaggacttgggccccccacgagcggcgccgg

SEQ ID NO: 259 - DNA, 120 bp, Artificial Sequence
  Description of Artificial Sequence: Synthetic polynucleotide
gtctcgtgccggtatttagccttagatggagtttaccacccgctttgggctgcattcccaagcaacccgactccgggaagacccgggcccggcgcgccgggggccgctaccggcctcaca

SEQ ID NO: 260 - DNA, 120 bp, Artificial Sequence
  Description of Artificial Sequence: Synthetic polynucleotide
ttgaactctctcttcaaagttcttttcaactttcccttacggtacttgttgactatcggtctcgtgccggtatttagccttagatggagtttaccacccgctttgggctgcattcccaag

SEQ ID NO: 261 - DNA, 120 bp, Artificial Sequence
  Description of Artificial Sequence: Synthetic polynucleotide
cctccgggcggactgcgcggaccccacccgtttacctcttaacggtttcacgccctcttgaactctctcttcaaagttcttttcaactttcccttacggtacttgttgactatcggtctc

SEQ ID NO: 262 - DNA, 120 bp, Artificial Sequence
  Description of Artificial Sequence: Synthetic polynucleotide
gggggcgggaaagatccgccgggccgccgacacggccggacccgccgccgggttgaatcctccgggcggactgcgcggaccccacccgtttacctcttaacggtttcacgccctcttgaa

SEQ ID NO: 263 - DNA, 120 bp, Artificial Sequence
  Description of Artificial Sequence: Synthetic polynucleotide
gaggaggaggaggggcggcgggggaagggagggcgggtggaggggtcgggaggaacggggggcgggaaagatccgccgggccgccgacacggccggacccgccgccgggttgaatcctcc

SEQ ID NO: 264 - DNA, 120 bp, Artificial Sequence
  Description of Artificial Sequence: Synthetic polynucleotide
ccccacccccggccccgcccgcccacccccgcacccgccggagcccgccccctccggggaggaggaggaggggcggcgggggaagggagggcgggtggaggggtcgggaggaacgggggg

SEQ ID NO: 265 - DNA, 120 bp, Artificial Sequence
  Description of Artificial Sequence: Synthetic polynucleotide
cggtggaaatgcgcccggcggcggccggtcgccggtcgggggacggtcccccgccgaccccacccccggccccgcccgcccacccccgcacccgccggagcccgccccctccggggagga

SEQ ID NO: 266 - DNA, 120 bp, Artificial Sequence
  Description of Artificial Sequence: Synthetic polynucleotide
gccaccttccccgccgggccttcccagccgtcccggagccggtcgcggcgcaccgccgcggtggaaatgcgcccggcggcggccggtcgccggtcgggggacggtcccccgccgacccca

SEQ ID NO: 267 - DNA, 120 bp, Artificial Sequence
  Description of Artificial Sequence: Synthetic polynucleotide
ggggggcggagacgggggaggaggaggacggacggacggacggacggggccccccgagccaccttccccgccgggccttcccagccgtcccggagccggtcgcggcgcaccgccgcggtg

SEQ ID NO: 268 - DNA, 120 bp, Artificial Sequence; identical to SEQ ID NO: 60
  Description of Artificial Sequence: Synthetic polynucleotide

SEQ ID NO: 269 - DNA, 120 bp, Artificial Sequence; identical to SEQ ID NO: 61
  Description of Artificial Sequence: Synthetic polynucleotide

SEQ ID NO: 270 - DNA, 120 bp, Artificial Sequence
  Description of Artificial Sequence: Synthetic polynucleotide
ggcgcgcccccgcgggggagacccccctcgcgggggattccccgcgggggtgggcgccgggaggggggagagcgcggcgacgggtctcgctccctcggccccgggattcggcgagtgctg

SEQ ID NO: 271 - DNA, 120 bp, Artificial Sequence; identical to SEQ ID NO: 62
  Description of Artificial Sequence: Synthetic polynucleotide

SEQ ID NO: 272 - DNA, 120 bp, Artificial Sequence
  Description of Artificial Sequence: Synthetic polynucleotide
cccgccccccgacccgcgcgcggcaccccccccgtcgccggggcgggggcgcggggaggaggggtgggagagcggtcgcgccgtgggaggggtggcccggcccccccacgaggagacgcc

SEQ ID NO: 273 - DNA, 120 bp, Artificial Sequence; identical to SEQ ID NO: 63
  Description of Artificial Sequence: Synthetic polynucleotide

SEQ ID NO: 274 - DNA, 120 bp, Artificial Sequence
  Description of Artificial Sequence: Synthetic polynucleotide
cgccgaccccgtgcgctcgctccgccgtccccctcttcgggggacgcgcgcgtggccccgagagaacctcccccgggcccgacggcgcgacccgcccggggcgcactggggacagtccgc

SEQ ID NO: 275 - DNA, 120 bp, Artificial Sequence; identical to SEQ ID NO: 64
  Description of Artificial Sequence: Synthetic polynucleotide

SEQ ID NO: 276 - DNA, 120 bp, Artificial Sequence
  Description of Artificial Sequence: Synthetic polynucleotide
agcgcgccggccttcaccttcattgcgccacggcggctttcgtgcgagcccccgactcgcgcacgtgttagactccttggtccgtgtttcaagacgggtcgggtgggtagccgacgtcgc

SEQ ID NO: 277 - DNA, 120 bp, Artificial Sequence; identical to SEQ ID NO: 65
  Description of Artificial Sequence: Synthetic polynucleotide

SEQ ID NO: 278 - DNA, 120 bp, Artificial Sequence
  Description of Artificial Sequence: Synthetic polynucleotide
ccatctttcgggtcctaacacgtgcgctcgtgctccacctccccggcgcggcgggcgagacgggccggtggtgcgccctcggcggactggagaggcctcgggatcccacctcggccggcg

SEQ ID NO: 279 - DNA, 120 bp, Artificial Sequence; identical to SEQ ID NO: 66
  Description of Artificial Sequence: Synthetic polynucleotide

SEQ ID NO: 280 - DNA, 120 bp, Artificial Sequence
  Description of Artificial Sequence: Synthetic polynucleotide
tagatggttcgattagtctttcgcccctatacccaggtcggacgaccgatttgcacgtcaggaccgctacggacctccaccagagtttcctctggcttcgccctgcccaggcatagttca

SEQ ID NO: 281 - DNA, 120 bp, Artificial Sequence; identical to SEQ ID NO: 67
  Description of Artificial Sequence: Synthetic polynucleotide

SEQ ID NO: 282 - DNA, 120 bp, Artificial Sequence
  Description of Artificial Sequence: Synthetic polynucleotide
tcgtttcggccccaagacctctaatcattcgctttaccggataaaactgcgtggcgggggtgcgtcgggtctgcgagagcgccagctatcctgagggaaacttcggagggaaccagctac

SEQ ID NO: 283 - DNA, 120 bp, Artificial Sequence; identical to SEQ ID NO: 68
  Description of Artificial Sequence: Synthetic polynucleotide

SEQ ID NO: 284 - DNA, 120 bp, Artificial Sequence
  Description of Artificial Sequence: Synthetic polynucleotide
catcccgcagcgccagttctgcttaccaaaagtggcccactaggcactcgcattccacgcccggctccacgccagcgagccgggcttcttacccatttaaagtttgagaataggttgaga

SEQ ID NO: 285 - DNA, 120 bp, Artificial Sequence; identical to SEQ ID NO: 69
  Description of Artificial Sequence: Synthetic polynucleotide

SEQ ID NO: 286 - DNA, 120 bp, Artificial Sequence
  Description of Artificial Sequence: Synthetic polynucleotide
ttacacactccttagcggattccgacttccatggccaccgtcctgctgtctatatcaaccaacaccttttctggggtctgatgagcgtcggcatcgggcgccttaacccggcgttcggtt

SEQ ID NO: 287 - DNA, 120 bp, Artificial Sequence; identical to SEQ ID NO: 70
  Description of Artificial Sequence: Synthetic polynucleotide

SEQ ID NO: 288 - DNA, 120 bp, Artificial Sequence
  Description of Artificial Sequence: Synthetic polynucleotide
cgcgcgcgcgcgccgcccccgccgctcccgtccactctcgactgccggcgacggccgggtatgggcccgacgctccagcgccatccattttcagggctagttgattcggcaggtgagttg

SEQ ID NO: 289 - DNA, 120 bp, Artificial Sequence; identical to SEQ ID NO: 71
  Description of Artificial Sequence: Synthetic polynucleotide

SEQ ID NO: 290 - DNA, 120 bp, Artificial Sequence
  Description of Artificial Sequence: Synthetic polynucleotide
gggggcggggagcggggcgtgggcgggaggaggggaggaggcgtgggggggggggcgggggaaggaccccacacccccgccgccgccgccgccgccgccctccgacgcacaccacacgcg

SEQ ID NO: 291 - DNA, 120 bp, Artificial Sequence; identical to SEQ ID NO: 72
  Description of Artificial Sequence: Synthetic polynucleotide

SEQ ID NO: 292 - DNA, 120 bp, Artificial Sequence
  Description of Artificial Sequence: Synthetic polynucleotide
tatttgctactaccaccaagatctgcacctgcggcggctccacccgggcccgcgccctaggcttcaaggctcaccgcagcggccctcctactcgtcgcggcgtagcgtccgcggggctcc

SEQ ID NO: 293 - DNA, 120 bp, Artificial Sequence; identical to SEQ ID NO: 73
  Description of Artificial Sequence: Synthetic polynucleotide

SEQ ID NO: 294 - DNA, 120 bp, Artificial Sequence
  Description of Artificial Sequence: Synthetic polynucleotide
aggccatcgcccgtcccttcggaacggcgctcgcccatctctcaggaccgactgacccatgttcaactgctgttcacatggaacccttctccacttcggccttcaaagttctcgtttgaa

SEQ ID NO: 295 - DNA, 120 bp, Artificial Sequence; identical to SEQ ID NO: 74
  Description of Artificial Sequence: Synthetic polynucleotide

SEQ ID NO: 296 - DNA, 120 bp, Artificial Sequence
  Description of Artificial Sequence: Synthetic polynucleotide
cccgccggcttctccgggatcggtcgcgttaccgcactggacgcctcgcggcgcccatctccgccactccggattcggggatctgaacccgactccctttcgatcggccgagggcaacgg

SEQ ID NO: 297 - DNA, 120 bp, Artificial Sequence; identical to SEQ ID NO: 75
  Description of Artificial Sequence: Synthetic polynucleotide

SEQ ID NO: 298 - DNA, 120 bp, Artificial Sequence
  Description of Artificial Sequence: Synthetic polynucleotide
agagctcaccggacgccgccggaaccgcgacgctttccaaggcacgggcccctctctcggggcgaacccattccagggcgccctgcccttcacaaagaaaagagaactctccccggggct

SEQ ID NO: 299 - DNA, 120 bp, Artificial Sequence; identical to SEQ ID NO: 76
  Description of Artificial Sequence: Synthetic polynucleotide

SEQ ID NO: 300 - DNA, 120 bp, Artificial Sequence
  Description of Artificial Sequence: Synthetic polynucleotide
ttcccttacctacattgttccaacatgccagaggctgttcaccttggagacctgctgcggatatgggtacggcccggcgcgagatttacaccctctcccccggattttcaagggccagcg

SEQ ID NO: 301 - DNA, 120 bp, Artificial Sequence; identical to SEQ ID NO: 77
  Description of Artificial Sequence: Synthetic polynucleotide

SEQ ID NO: 302 - DNA, 120 bp, Artificial Sequence
  Description of Artificial Sequence: Synthetic polynucleotide
gggggcggcggcgcctcgtccagccgcggcgcgcgcccagccccgcttcgcgccccagcccgaccgacccagcccttagagccaatccttatcccgaagttacggatccggcttgccgac

SEQ ID NO: 303 - DNA, 120 bp, Artificial Sequence; identical to SEQ ID NO: 78
  Description of Artificial Sequence: Synthetic polynucleotide

SEQ ID NO: 304 - DNA, 120 bp, Artificial Sequence
  Description of Artificial Sequence: Synthetic polynucleotide
aggggggaggacggggagcgggggagagagagagagagagggcgcggggcggggagggagcgagcggcgcgcgcggggtggggcgggggagggccgcgaggggggtgccccgggcgtggg

SEQ ID NO: 305 - DNA, 120 bp, Artificial Sequence; identical to SEQ ID NO: 79
  Description of Artificial Sequence: Synthetic polynucleotide

SEQ ID NO: 306 - DNA, 120 bp, Artificial Sequence
  Description of Artificial Sequence: Synthetic polynucleotide
gggcccccctcgcgggggaccgtgcccccgccgccggggccccgcggcgggccgccgccggcccctgccgccccgacccttctccccccgccgccgcccccacgcggcgctcccccgggg

SEQ ID NO: 307 - DNA, 120 bp, Artificial Sequence; identical to SEQ ID NO: 80
  Description of Artificial Sequence: Synthetic polynucleotide

SEQ ID NO: 308 - DNA, 120 bp, Artificial Sequence
  Description of Artificial Sequence: Synthetic polynucleotide
gcgccggcgcccgccgggctccccgggggcggccgcgacgcccgccgcagctggggcgatccacgggaagggcccggctcgcgtccagagtcgccgccgccgccggccccccgggtgccc

SEQ ID NO: 309 - DNA, 120 bp, Artificial Sequence; identical to SEQ ID NO: 81
  Description of Artificial Sequence: Synthetic polynucleotide

SEQ ID NO: 310 - DNA, 120 bp, Artificial Sequence
  Description of Artificial Sequence: Synthetic polynucleotide
cgggggggtagggcggggggacgaaccgccccgccccgccgcccgccgaccgccgccgcccgaccgctccccgcccccagcggacgcgcgcgcgacgagacgtggggtgggggggggggc

SEQ ID NO: 311 - DNA, 120 bp, Artificial Sequence; identical to SEQ ID NO: 82
  Description of Artificial Sequence: Synthetic polynucleotide

SEQ ID NO: 312 - DNA, 120 bp, Artificial Sequence
  Description of Artificial Sequence: Synthetic polynucleotide
cgcggaaccgcggccccgggggcggacccggcgggggggaccggcccgcggcccctccgccgcctgccgccgccgccgccgcgcgccgaggaggaggggggaacggggggcggacggggc

SEQ ID NO: 313 - DNA, 120 bp, Artificial Sequence; identical to SEQ ID NO: 83
  Description of Artificial Sequence: Synthetic polynucleotide

SEQ ID NO: 314 - DNA, 120 bp, Artificial Sequence
  Description of Artificial Sequence: Synthetic polynucleotide
acatcgcgtcaacacccgccgcgggccttcgcgatgctttgttttaattaaacagtcggattcccctggtccgcaccagttctaagtcggctgctaggcgccggccgaggcgaggcgccg

SEQ ID NO: 315 - DNA, 120 bp, Artificial Sequence; identical to SEQ ID NO: 84
  Description of Artificial Sequence: Synthetic polynucleotide

SEQ ID NO: 316 - DNA, 120 bp, Artificial Sequence
  Description of Artificial Sequence: Synthetic polynucleotide
gcgtcactaattagatgacgaggcatttggctaccttaagagagtcatagttactcccgccgtttacccgcgcttcattgaatttcttcactttgacattcagagcactgggcagaaatc

SEQ ID NO: 317 - DNA, 120 bp, Artificial Sequence; identical to SEQ ID NO: 85
  Description of Artificial Sequence: Synthetic polynucleotide

SEQ ID NO: 318 - DNA, 120 bp, Artificial Sequence
  Description of Artificial Sequence: Synthetic polynucleotide
actagagtcaagctcaacagggtcttctttccccgctgattccgccaagcccgttcccttggctgtggtttcgctggatagtaggtagggacagtgggaatctcgttcatccattcatgc

SEQ ID NO: 319 - DNA, 120 bp, Artificial Sequence; identical to SEQ ID NO: 86
  Description of Artificial Sequence: Synthetic polynucleotide

SEQ ID NO: 320 - DNA, 120 bp, Artificial Sequence
  Description of Artificial Sequence: Synthetic polynucleotide
tatttcaccggcggcccgcagggccggcggaccccgccccgggcccctcgcggggacaccgggggggcgccgggggcctcccacttattctacacctctcatgtctcttcaccgtgccag

SEQ ID NO: 321 - DNA, 120 bp, Artificial Sequence; identical to SEQ ID NO: 87
  Description of Artificial Sequence: Synthetic polynucleotide

SEQ ID NO: 322 - DNA, 120 bp, Artificial Sequence
  Description of Artificial Sequence: Synthetic polynucleotide
tccccggagcgggtcgcgcccggccggcgcgcggccgggcgcttggcgccagaagcgagagcccctcggggctcgcccccccgcctcaccgggtcagtgaaaaaacgatcagagtagtgg

SEQ ID NO: 323 - DNA, 120 bp, Artificial Sequence; identical to SEQ ID NO: 88
  Description of Artificial Sequence: Synthetic polynucleotide

SEQ ID NO: 324 - DNA, 120 bp, Artificial Sequence
  Description of Artificial Sequence: Synthetic polynucleotide
aagcgagcttttgcccttctgctccacgggaggtttctgtcctccctgagctcgccttaggacacctgcgttaccgtttgacaggtgtaccgccccagtcaaactccccacctggcactg

SEQ ID NO: 325 - DNA, 120 bp, Artificial Sequence; identical to SEQ ID NO: 89
  Description of Artificial Sequence: Synthetic polynucleotide

SEQ ID NO: 326 - DNA, 120 bp, Artificial Sequence
  Description of Artificial Sequence: Synthetic polynucleotide
cgccacaagccagttatccctgtggtaacttttctgacacctcctgcttaaaacccaaaaggtcagaaggatcgtgaggccccgctttcacggtctgtattcgtactgaaaatcaagatc

SEQ ID NO: 327 - DNA, 120 bp, Artificial Sequence; identical to SEQ ID NO: 90
  Description of Artificial Sequence: Synthetic polynucleotide

SEQ ID NO: 328 - DNA, 120 bp, Artificial Sequence
  Description of Artificial Sequence: Synthetic polynucleotide
acccagctcacgttccctattagtgggtgaacaatccaacgcttggtgaattctgcttcacaatgataggaagagccgacatcgaaggatcaaaaagcgacgtcgctatgaacgcttggc

SEQ ID NO: 329 - DNA, 120 bp, Artificial Sequence; identical to SEQ ID NO: 91
  Description of Artificial Sequence: Synthetic polynucleotide

SEQ ID NO: 330 - DNA, 120 bp, Artificial Sequence
  Description of Artificial Sequence: Synthetic polynucleotide
cctcagccaagcacatacaccaaatgtctgaacctgcggttcctctcgtactgagcaggattaccatggcaacaacacatcatcagtagggtaaaactaacctgtctcacgacggtctaa

SEQ ID NO: 331 - DNA, 120 bp, Artificial Sequence; identical to SEQ ID NO: 92
  Description of Artificial Sequence: Synthetic polynucleotide

SEQ ID NO: 332 - DNA, 120 bp, Artificial Sequence
  Description of Artificial Sequence: Synthetic polynucleotide
accggctatccgaggccaaccgaggctccgcggcgctgccgtatcgttccgcctgggcgggattctgacttagaggcgttcagtcataatcccacagatggtagcttcgccccattggct

SEQ ID NO: 333 - DNA, 120 bp, Artificial Sequence; identical to SEQ ID NO: 93
  Description of Artificial Sequence: Synthetic polynucleotide

SEQ ID NO: 334 - DNA, 120 bp, Artificial Sequence
  Description of Artificial Sequence: Synthetic polynucleotide
ccaggacgaagggcactccgcaccggaccccggtcccggcgcgcggcggggcacgcgccctcccgcgcgcgcggggcgcgtggagggggggggcggcccgccggcggggacaggcggggg

SEQ ID NO: 335 - DNA, 120 bp, Artificial Sequence; identical to SEQ ID NO: 94
  Description of Artificial Sequence: Synthetic polynucleotide

SEQ ID NO: 336 - DNA, 120 bp, Artificial Sequence
  Description of Artificial Sequence: Synthetic polynucleotide
acgtacgaaaccccgacccagaagcaggtcgtctacgaatggtttagcgccaggttccccacgaacgtgcggtgcgtgacgggcgagggggcggccgcctctccggccgcgccccgtttc

SEQ ID NO: 337 - DNA, 120 bp, Artificial Sequence; identical to SEQ ID NO: 95
  Description of Artificial Sequence: Synthetic polynucleotide

SEQ ID NO: 338 - DNA, 120 bp, Artificial Sequence; identical to SEQ ID NO: 96
  Description of Artificial Sequence: Synthetic polynucleotide

SEQ ID NO: 339 - DNA, 120 bp, Artificial Sequence
  Description of Artificial Sequence: Synthetic polynucleotide
gatcggggacccccgagccgctggcccgcggccttcccccggctcccgcgctcccgagcttccaccacatcgggcccgctcggagcagggagtgctccgaggcgtcagggcccagggccc

SEQ ID NO: 340 - DNA, 120 bp, Artificial Sequence
  Description of Artificial Sequence: Synthetic polynucleotide
gcccggccgtgcccgccggattgcagccgacaccgccagcccggggccgcggggctcggatcggggacccccgagccgctggcccgcggccttcccccggctcccgcgctcccgagcttc

SEQ ID NO: 341 - DNA, 120 bp, Artificial Sequence
  Description of Artificial Sequence: Synthetic polynucleotide
ggtggtatggccgtagacgctgaaggaggcgcctggctgccccaagagcccagccccgcccggccgtgcccgccggattgcagccgacaccgccagcccggggccgcggggctcggatcg

SEQ ID NO: 342 - DNA, 120 bp, Artificial Sequence
  Description of Artificial Sequence: Synthetic polynucleotide
actaaccaggcccgaccctgcttagcttccgagatcagacgagatcgggcgcgttcagggtggtatggccgtagacgctgaaggaggcgcctggctgccccaagagcccagccccgcccg

SEQ ID NO: 343 - DNA, 120 bp, Artificial Sequence
  Description of Artificial Sequence: Synthetic polynucleotide
aaaagccaaagaaaaagcctacagcacccggtattcccaggcggtctcccatccaagtactaaccaggcccgaccctgcttagcttccgagatcagacgagatcgggcgcgttcagggtg

SEQ ID NO: 344 - DNA, 120 bp, Artificial Sequence
  Description of Artificial Sequence: Synthetic polynucleotide
cactccagcctgggcgacagggcgagactccgtctggaagaaaaggaaagaaacagcaaaaagccaaagaaaaagcctacagcacccggtattcccaggcggtctcccatccaagtacta

SEQ ID NO: 345 - DNA, 120 bp, Artificial Sequence
  Description of Artificial Sequence: Synthetic polynucleotide
ggggaatggcgtggacccgggaggcggagcttgcagtgagccgagatggcgccaccgcactccagcctgggcgacagggcgagactccgtctggaagaaaaggaaagaaacagcaaaaag

SEQ ID NO: 346 - DNA, 120 bp, Artificial Sequence
  Description of Artificial Sequence: Synthetic polynucleotide
aagtagccgggcgtggtggcgggcgcctgtaggcccagctactcgggaggctgaggccggggaatggcgtggacccgggaggcggagcttgcagtgagccgagatggcgccaccgcactc

SEQ ID NO: 347 - DNA, 120 bp, Artificial Sequence; identical to SEQ ID NO: 101
  Description of Artificial Sequence: Synthetic polynucleotide

SEQ ID NO: 348 - DNA, 120 bp, Artificial Sequence; identical to SEQ ID NO: 102
  Description of Artificial Sequence: Synthetic polynucleotide

SEQ ID NO: 349 - DNA, 120 bp, Artificial Sequence; identical to SEQ ID NO: 103
  Description of Artificial Sequence: Synthetic polynucleotide

SEQ ID NO: 350 - DNA, 120 bp, Artificial Sequence; identical to SEQ ID NO: 185
  Description of Artificial Sequence: Synthetic polynucleotide

SEQ ID NO: 351 - DNA, 120 bp, Artificial Sequence; identical to SEQ ID NO: 18
  Description of Artificial Sequence: Synthetic polynucleotide

SEQ ID NO: 352 - DNA, 120 bp, Artificial Sequence; identical to SEQ ID NO: 187
  Description of Artificial Sequence: Synthetic polynucleotide

SEQ ID NO: 353 - DNA, 120 bp, Artificial Sequence; identical to SEQ ID NO: 19
  Description of Artificial Sequence: Synthetic polynucleotide

SEQ ID NO: 354 - DNA, 120 bp, Artificial Sequence; identical to SEQ ID NO: 189
  Description of Artificial Sequence: Synthetic polynucleotide

SEQ ID NO: 355 - DNA, 120 bp, Artificial Sequence; identical to SEQ ID NO: 20
  Description of Artificial Sequence: Synthetic polynucleotide

SEQ ID NO: 356 - DNA, 120 bp, Artificial Sequence; identical to SEQ ID NO: 191
  Description of Artificial Sequence: Synthetic polynucleotide

SEQ ID NO: 357 - DNA, 120 bp, Artificial Sequence; identical to SEQ ID NO: 193
  Description of Artificial Sequence: Synthetic polynucleotide

SEQ ID NO: 358 - DNA, 120 bp, Artificial Sequence; identical to SEQ ID NO: 22
  Description of Artificial Sequence: Synthetic polynucleotide

SEQ ID NO: 359 - DNA, 120 bp, Artificial Sequence; identical to SEQ ID NO: 195
  Description of Artificial Sequence: Synthetic polynucleotide

SEQ ID NO: 360 - DNA, 120 bp, Artificial Sequence; identical to SEQ ID NO: 23
  Description of Artificial Sequence: Synthetic polynucleotide

SEQ ID NO: 361 - DNA, 120 bp, Artificial Sequence; identical to SEQ ID NO: 197
  Description of Artificial Sequence: Synthetic polynucleotide

SEQ ID NO: 362 - DNA, 120 bp, Artificial Sequence; identical to SEQ ID NO: 24
  Description of Artificial Sequence: Synthetic polynucleotide

SEQ ID NO: 363 - DNA, 120 bp, Artificial Sequence; identical to SEQ ID NO: 25
  Description of Artificial Sequence: Synthetic polynucleotide

SEQ ID NO: 364 - DNA, 120 bp, Artificial Sequence; identical to SEQ ID NO: 200
  Description of Artificial Sequence: Synthetic polynucleotide

SEQ ID NO: 365 - DNA, 120 bp, Artificial Sequence; identical to SEQ ID NO: 26
  Description of Artificial Sequence: Synthetic polynucleotide

SEQ ID NO: 366 - DNA, 120 bp, Artificial Sequence; identical to SEQ ID NO: 202
  Description of Artificial Sequence: Synthetic polynucleotide

SEQ ID NO: 367 - DNA, 120 bp, Artificial Sequence; identical to SEQ ID NO: 27
  Description of Artificial Sequence: Synthetic polynucleotide

SEQ ID NO: 368 - DNA, 120 bp, Artificial Sequence; identical to SEQ ID NO: 204
  Description of Artificial Sequence: Synthetic polynucleotide

SEQ ID NO: 369 - DNA, 120 bp, Artificial Sequence; identical to SEQ ID NO: 28
  Description of Artificial Sequence: Synthetic polynucleotide

SEQ ID NO: 370 - DNA, 120 bp, Artificial Sequence; identical to SEQ ID NO: 206
  Description of Artificial Sequence: Synthetic polynucleotide

SEQ ID NO: 371 - DNA, 120 bp, Artificial Sequence; identical to SEQ ID NO: 29
  Description of Artificial Sequence: Synthetic polynucleotide

SEQ ID NO: 372 - DNA, 120 bp, Artificial Sequence; identical to SEQ ID NO: 208
  Description of Artificial Sequence: Synthetic polynucleotide

SEQ ID NO: 373 - DNA, 120 bp, Artificial Sequence; identical to SEQ ID NO: 30
  Description of Artificial Sequence: Synthetic polynucleotide

SEQ ID NO: 374 - DNA, 120 bp, Artificial Sequence; identical to SEQ ID NO: 210
  Description of Artificial Sequence: Synthetic polynucleotide

SEQ ID NO: 375 - DNA, 120 bp, Artificial Sequence; identical to SEQ ID NO: 31
  Description of Artificial Sequence: Synthetic polynucleotide

SEQ ID NO: 376 - DNA, 120 bp, Artificial Sequence; identical to SEQ ID NO: 212
  Description of Artificial Sequence: Synthetic polynucleotide

SEQ ID NO: 377 - DNA, 120 bp, Artificial Sequence; identical to SEQ ID NO: 32
  Description of Artificial Sequence: Synthetic polynucleotide

SEQ ID NO: 378 - DNA, 120 bp, Artificial Sequence; identical to SEQ ID NO: 214
  Description of Artificial Sequence: Synthetic polynucleotide

SEQ ID NO: 379 - DNA, 120 bp, Artificial Sequence; identical to SEQ ID NO: 33
  Description of Artificial Sequence: Synthetic polynucleotide

SEQ ID NO: 380 - DNA, 120 bp, Artificial Sequence; identical to SEQ ID NO: 216
  Description of Artificial Sequence: Synthetic polynucleotide

SEQ ID NO: 381 - DNA, 120 bp, Artificial Sequence; identical to SEQ ID NO: 217
  Description of Artificial Sequence: Synthetic polynucleotide

SEQ ID NO: 382 - DNA, 120 bp, Artificial Sequence; identical to SEQ ID NO: 218
  Description of Artificial Sequence: Synthetic polynucleotide

SEQ ID NO: 383 - DNA, 120 bp, Artificial Sequence; identical to SEQ ID NO: 35
  Description of Artificial Sequence: Synthetic polynucleotide

SEQ ID NO: 384 - DNA, 120 bp, Artificial Sequence; identical to SEQ ID NO: 220
  Description of Artificial Sequence: Synthetic polynucleotide

SEQ ID NO: 385 - DNA, 120 bp, Artificial Sequence; identical to SEQ ID NO: 36
  Description of Artificial Sequence: Synthetic polynucleotide

SEQ ID NO: 386 - DNA, 120 bp, Artificial Sequence; identical to SEQ ID NO: 222
  Description of Artificial Sequence: Synthetic polynucleotide

SEQ ID NO: 387 - DNA, 120 bp, Artificial Sequence; identical to SEQ ID NO: 37
  Description of Artificial Sequence: Synthetic polynucleotide

SEQ ID NO: 388 - DNA, 120 bp, Artificial Sequence; identical to SEQ ID NO: 38
  Description of Artificial Sequence: Synthetic polynucleotide

SEQ ID NO: 389 - DNA, 120 bp, Artificial Sequence; identical to SEQ ID NO: 225
  Description of Artificial Sequence: Synthetic polynucleotide

SEQ ID NO: 390 - DNA, 120 bp, Artificial Sequence; identical to SEQ ID NO: 126
  Description of Artificial Sequence: Synthetic polynucleotide

SEQ ID NO: 391 - DNA, 120 bp, Artificial Sequence; identical to SEQ ID NO: 227
  Description of Artificial Sequence: Synthetic polynucleotide

SEQ ID NO: 392 - DNA, 120 bp, Artificial Sequence; identical to SEQ ID NO: 39
  Description of Artificial Sequence: Synthetic polynucleotide

SEQ ID NO: 393 - DNA, 120 bp, Artificial Sequence; identical to SEQ ID NO: 229
  Description of Artificial Sequence: Synthetic polynucleotide

SEQ ID NO: 394 - DNA, 120 bp, Artificial Sequence; identical to SEQ ID NO: 40
  Description of Artificial Sequence: Synthetic polynucleotide

SEQ ID NO: 395 - DNA, 120 bp, Artificial Sequence; identical to SEQ ID NO: 231
  Description of Artificial Sequence: Synthetic polynucleotide

SEQ ID NO: 396 - DNA, 120 bp, Artificial Sequence; identical to SEQ ID NO: 41
  Description of Artificial Sequence: Synthetic polynucleotide

SEQ ID NO: 397 - DNA, 120 bp, Artificial Sequence; identical to SEQ ID NO: 233
  Description of Artificial Sequence: Synthetic polynucleotide

SEQ ID NO: 398 - DNA, 120 bp, Artificial Sequence; identical to SEQ ID NO: 42
  Description of Artificial Sequence: Synthetic polynucleotide

SEQ ID NO: 399 - DNA, 120 bp, Artificial Sequence; identical to SEQ ID NO: 235
  Description of Artificial Sequence: Synthetic polynucleotide

SEQ ID NO: 400 - DNA, 120 bp, Artificial Sequence; identical to SEQ ID NO: 43
  Description of Artificial Sequence: Synthetic polynucleotide

SEQ ID NO: 401 - DNA, 120 bp, Artificial Sequence; identical to SEQ ID NO: 237
  Description of Artificial Sequence: Synthetic polynucleotide

SEQ ID NO: 402 - DNA, 120 bp, Artificial Sequence; identical to SEQ ID NO: 44
  Description of Artificial Sequence: Synthetic polynucleotide

SEQ ID NO: 403 - DNA, 120 bp, Artificial Sequence; identical to SEQ ID NO: 239
  Description of Artificial Sequence: Synthetic polynucleotide

SEQ ID NO: 404 - DNA, 120 bp, Artificial Sequence; identical to SEQ ID NO: 45
  Description of Artificial Sequence: Synthetic polynucleotide

SEQ ID NO: 405 - DNA, 120 bp, Artificial Sequence; identical to SEQ ID NO: 241
  Description of Artificial Sequence: Synthetic polynucleotide

SEQ ID NO: 406 - DNA, 120 bp, Artificial Sequence; identical to SEQ ID NO: 46
  Description of Artificial Sequence: Synthetic polynucleotide

SEQ ID NO: 407 - DNA, 120 bp, Artificial Sequence; identical to SEQ ID NO: 243
  Description of Artificial Sequence: Synthetic polynucleotide

SEQ ID NO: 408 - DNA, 120 bp, Artificial Sequence; identical to SEQ ID NO: 47
  Description of Artificial Sequence: Synthetic polynucleotide

SEQ ID NO: 409 - DNA, 120 bp, Artificial Sequence; identical to SEQ ID NO: 245
  Description of Artificial Sequence: Synthetic polynucleotide

SEQ ID NO: 410 - DNA, 120 bp, Artificial Sequence; identical to SEQ ID NO: 48
  Description of Artificial Sequence: Synthetic polynucleotide

SEQ ID NO: 411 - DNA, 120 bp, Artificial Sequence; identical to SEQ ID NO: 247
  Description of Artificial Sequence: Synthetic polynucleotide

SEQ ID NO: 412 - DNA, 120 bp, Artificial Sequence; identical to SEQ ID NO: 49
  Description of Artificial Sequence: Synthetic polynucleotide

SEQ ID NO: 413 - DNA, 120 bp, Artificial Sequence; identical to SEQ ID NO: 249
  Description of Artificial Sequence: Synthetic polynucleotide

SEQ ID NO: 414 - DNA, 120 bp, Artificial Sequence; identical to SEQ ID NO: 50
  Description of Artificial Sequence: Synthetic polynucleotide

SEQ ID NO: 415 - DNA, 120 bp, Artificial Sequence; identical to SEQ ID NO: 251
  Description of Artificial Sequence: Synthetic polynucleotide

SEQ ID NO: 416 - DNA, 120 bp, Artificial Sequence; identical to SEQ ID NO: 51
  Description of Artificial Sequence: Synthetic polynucleotide

SEQ ID NO: 417 - DNA, 120 bp, Artificial Sequence; identical to SEQ ID NO: 253
  Description of Artificial Sequence: Synthetic polynucleotide

SEQ ID NO: 418 - DNA, 120 bp, Artificial Sequence; identical to SEQ ID NO: 52
  Description of Artificial Sequence: Synthetic polynucleotide

SEQ ID NO: 419 - DNA, 120 bp, Artificial Sequence; identical to SEQ ID NO: 53
  Description of Artificial Sequence: Synthetic polynucleotide

SEQ ID NO: 420 - DNA, 120 bp, Artificial Sequence; identical to SEQ ID NO: 256
  Description of Artificial Sequence: Synthetic polynucleotide

SEQ ID NO: 421 - DNA, 120 bp, Artificial Sequence; identical to SEQ ID NO: 257
  Description of Artificial Sequence: Synthetic polynucleotide

SEQ ID NO: 422 - DNA, 120 bp, Artificial Sequence; identical to SEQ ID NO: 258
  Description of Artificial Sequence: Synthetic polynucleotide

SEQ ID NO: 423 - DNA, 120 bp, Artificial Sequence; identical to SEQ ID NO: 259
  Description of Artificial Sequence: Synthetic polynucleotide

SEQ ID NO: 424 - DNA, 120 bp, Artificial Sequence; identical to SEQ ID NO: 260
  Description of Artificial Sequence: Synthetic polynucleotide

SEQ ID NO: 425 - DNA, 120 bp, Artificial Sequence; identical to SEQ ID NO: 261
  Description of Artificial Sequence: Synthetic polynucleotide

SEQ ID NO: 426 - DNA, 120 bp, Artificial Sequence; identical to SEQ ID NO: 262
  Description of Artificial Sequence: Synthetic polynucleotide

SEQ ID NO: 427 - DNA, 120 bp, Artificial Sequence; identical to SEQ ID NO: 263
  Description of Artificial Sequence: Synthetic polynucleotide

SEQ ID NO: 428 - DNA, 120 bp, Artificial Sequence; identical to SEQ ID NO: 266
  Description of Artificial Sequence: Synthetic polynucleotide

SEQ ID NO: 429 - DNA, 120 bp, Artificial Sequence; identical to SEQ ID NO: 267
  Description of Artificial Sequence: Synthetic polynucleotide

SEQ ID NO: 430 - DNA, 120 bp, Artificial Sequence; identical to SEQ ID NO: 61
  Description of Artificial Sequence: Synthetic polynucleotide

SEQ ID NO: 431 - DNA, 120 bp, Artificial Sequence; identical to SEQ ID NO: 270
  Description of Artificial Sequence: Synthetic polynucleotide

SEQ ID NO: 432 - DNA, 120 bp, Artificial Sequence; identical to SEQ ID NO: 274
  Description of Artificial Sequence: Synthetic polynucleotide

SEQ ID NO: 433 - DNA, 120 bp, Artificial Sequence; identical to SEQ ID NO: 64
  Description of Artificial Sequence: Synthetic polynucleotide

SEQ ID NO: 434 - DNA, 120 bp, Artificial Sequence; identical to SEQ ID NO: 276
  Description of Artificial Sequence: Synthetic polynucleotide

SEQ ID NO: 435 - DNA, 120 bp, Artificial Sequence; identical to SEQ ID NO: 65
  Description of Artificial Sequence: Synthetic polynucleotide

SEQ ID NO: 436 - DNA, 120 bp, Artificial Sequence; identical to SEQ ID NO: 278
  Description of Artificial Sequence: Synthetic polynucleotide

SEQ ID NO: 437 - DNA, 120 bp, Artificial Sequence; identical to SEQ ID NO: 66
  Description of Artificial Sequence: Synthetic polynucleotide

SEQ ID NO: 438 - DNA, 120 bp, Artificial Sequence; identical to SEQ ID NO: 280
  Description of Artificial Sequence: Synthetic polynucleotide

SEQ ID NO: 439 - DNA, 120 bp, Artificial Sequence; identical to SEQ ID NO: 67
  Description of Artificial Sequence: Synthetic polynucleotide

SEQ ID NO: 440 - DNA, 120 bp, Artificial Sequence; identical to SEQ ID NO: 282
  Description of Artificial Sequence: Synthetic polynucleotide

SEQ ID NO: 441 - DNA, 120 bp, Artificial Sequence; identical to SEQ ID NO: 68
  Description of Artificial Sequence: Synthetic polynucleotide

SEQ ID NO: 442 - DNA, 120 bp, Artificial Sequence; identical to SEQ ID NO: 284
  Description of Artificial Sequence: Synthetic polynucleotide

SEQ ID NO: 443 - DNA, 120 bp, Artificial Sequence; identical to SEQ ID NO: 69
  Description of Artificial Sequence: Synthetic polynucleotide

SEQ ID NO: 444 - DNA, 120 bp, Artificial Sequence; identical to SEQ ID NO: 286
  Description of Artificial Sequence: Synthetic polynucleotide

SEQ ID NO: 445 - DNA, 120 bp, Artificial Sequence; identical to SEQ ID NO: 70
  Description of Artificial Sequence: Synthetic polynucleotide

SEQ ID NO: 446 - DNA, 120 bp, Artificial Sequence; identical to SEQ ID NO: 288
  Description of Artificial Sequence: Synthetic polynucleotide

SEQ ID NO: 447 - DNA, 120 bp, Artificial Sequence; identical to SEQ ID NO: 71
  Description of Artificial Sequence: Synthetic polynucleotide

SEQ ID NO: 448 - DNA, 120 bp, Artificial Sequence; identical to SEQ ID NO: 72
  Description of Artificial Sequence: Synthetic polynucleotide

SEQ ID NO: 449 - DNA, 120 bp, Artificial Sequence; identical to SEQ ID NO: 292
  Description of Artificial Sequence: Synthetic polynucleotide

SEQ ID NO: 450 - DNA, 120 bp, Artificial Sequence; identical to SEQ ID NO: 73
  Description of Artificial Sequence: Synthetic polynucleotide

SEQ ID NO: 451 - DNA, 120 bp, Artificial Sequence; identical to SEQ ID NO: 294
  Description of Artificial Sequence: Synthetic polynucleotide

SEQ ID NO: 452 - DNA, 120 bp, Artificial Sequence; identical to SEQ ID NO: 74
  Description of Artificial Sequence: Synthetic polynucleotide

SEQ ID NO: 453 - DNA, 120 bp, Artificial Sequence; identical to SEQ ID NO: 296
  Description of Artificial Sequence: Synthetic polynucleotide

SEQ ID NO: 454 - DNA, 120 bp, Artificial Sequence; identical to SEQ ID NO: 75
  Description of Artificial Sequence: Synthetic polynucleotide

SEQ ID NO: 455 - DNA, 120 bp, Artificial Sequence; identical to SEQ ID NO: 298
  Description of Artificial Sequence: Synthetic polynucleotide

SEQ ID NO: 456 - DNA, 120 bp, Artificial Sequence; identical to SEQ ID NO: 76
  Description of Artificial Sequence: Synthetic polynucleotide

SEQ ID NO: 457 - DNA, 120 bp, Artificial Sequence; identical to SEQ ID NO: 300
  Description of Artificial Sequence: Synthetic polynucleotide

SEQ ID NO: 458 - DNA, 120 bp, Artificial Sequence; identical to SEQ ID NO: 77
  Description of Artificial Sequence: Synthetic polynucleotide

SEQ ID NO: 459 - DNA, 120 bp, Artificial Sequence; identical to SEQ ID NO: 302
  Description of Artificial Sequence: Synthetic polynucleotide

SEQ ID NO: 460 - DNA, 120 bp, Artificial Sequence; identical to SEQ ID NO: 304
  Description of Artificial Sequence: Synthetic polynucleotide

SEQ ID NO: 461 - DNA, 120 bp, Artificial Sequence; identical to SEQ ID NO: 79
  Description of Artificial Sequence: Synthetic polynucleotide

SEQ ID NO: 462 - DNA, 120 bp, Artificial Sequence; identical to SEQ ID NO: 83
  Description of Artificial Sequence: Synthetic polynucleotide

SEQ ID NO: 463 - DNA, 120 bp, Artificial Sequence; identical to SEQ ID NO: 314
  Description of Artificial Sequence: Synthetic polynucleotide

SEQ ID NO: 464 - DNA, 120 bp, Artificial Sequence; identical to SEQ ID NO: 84
  Description of Artificial Sequence: Synthetic polynucleotide

SEQ ID NO: 465 - DNA, 120 bp, Artificial Sequence; identical to SEQ ID NO: 316
  Description of Artificial Sequence: Synthetic polynucleotide

SEQ ID NO: 466 - DNA, 120 bp, Artificial Sequence; identical to SEQ ID NO: 85
  Description of Artificial Sequence: Synthetic polynucleotide

SEQ ID NO: 467 - DNA, 120 bp, Artificial Sequence; identical to SEQ ID NO: 318
  Description of Artificial Sequence: Synthetic polynucleotide

SEQ ID NO: 468 - DNA, 120 bp, Artificial Sequence; identical to SEQ ID NO: 86
  Description of Artificial Sequence: Synthetic polynucleotide

SEQ ID NO: 469 - DNA, 120 bp, Artificial Sequence; identical to SEQ ID NO: 320
  Description of Artificial Sequence: Synthetic polynucleotide

SEQ ID NO: 470 - DNA, 120 bp, Artificial Sequence; identical to SEQ ID NO: 87
  Description of Artificial Sequence: Synthetic polynucleotide

SEQ ID NO: 471 - DNA, 120 bp, Artificial Sequence; identical to SEQ ID NO: 322
  Description of Artificial Sequence: Synthetic polynucleotide

SEQ ID NO: 472 - DNA, 120 bp, Artificial Sequence; identical to SEQ ID NO: 88
  Description of Artificial Sequence: Synthetic polynucleotide

SEQ ID NO: 473 - DNA, 120 bp, Artificial Sequence; identical to SEQ ID NO: 324
  Description of Artificial Sequence: Synthetic polynucleotide

SEQ ID NO: 474 - DNA, 120 bp, Artificial Sequence; identical to SEQ ID NO: 89
  Description of Artificial Sequence: Synthetic polynucleotide

SEQ ID NO: 475 - DNA, 120 bp, Artificial Sequence; identical to SEQ ID NO: 326
  Description of Artificial Sequence: Synthetic polynucleotide

SEQ ID NO: 476 - DNA, 120 bp, Artificial Sequence; identical to SEQ ID NO: 90
  Description of Artificial Sequence: Synthetic polynucleotide

SEQ ID NO: 477 - DNA, 120 bp, Artificial Sequence; identical to SEQ ID NO: 328
  Description of Artificial Sequence: Synthetic polynucleotide

SEQ ID NO: 478 - DNA, 120 bp, Artificial Sequence; identical to SEQ ID NO: 91
  Description of Artificial Sequence: Synthetic polynucleotide

SEQ ID NO: 479 - DNA, 120 bp, Artificial Sequence; identical to SEQ ID NO: 330
  Description of Artificial Sequence: Synthetic polynucleotide

SEQ ID NO: 480 - DNA, 120 bp, Artificial Sequence; identical to SEQ ID NO: 92
  Description of Artificial Sequence: Synthetic polynucleotide

SEQ ID NO: 481 - DNA, 120 bp, Artificial Sequence; identical to SEQ ID NO: 332
  Description of Artificial Sequence: Synthetic polynucleotide

SEQ ID NO: 482 - DNA, 120 bp, Artificial Sequence; identical to SEQ ID NO: 93
  Description of Artificial Sequence: Synthetic polynucleotide

SEQ ID NO: 483 - DNA, 120 bp, Artificial Sequence; identical to SEQ ID NO: 94
  Description of Artificial Sequence: Synthetic polynucleotide

SEQ ID NO: 484 - DNA, 120 bp, Artificial Sequence; identical to SEQ ID NO: 336
  Description of Artificial Sequence: Synthetic polynucleotide

SEQ ID NO: 485 - DNA, 120 bp, Artificial Sequence; identical to SEQ ID NO: 95
  Description of Artificial Sequence: Synthetic polynucleotide

SEQ ID NO: 486 - DNA, 120 bp, Artificial Sequence; identical to SEQ ID NO: 96
  Description of Artificial Sequence: Synthetic polynucleotide

SEQ ID NO: 487 - DNA, 120 bp, Artificial Sequence; identical to SEQ ID NO: 339
  Description of Artificial Sequence: Synthetic polynucleotide

SEQ ID NO: 488 - DNA, 120 bp, Artificial Sequence; identical to SEQ ID NO: 340
  Description of Artificial Sequence: Synthetic polynucleotide

SEQ ID NO: 489 - DNA, 120 bp, Artificial Sequence; identical to SEQ ID NO: 341
  Description of Artificial Sequence: Synthetic polynucleotide

SEQ ID NO: 490 - DNA, 120 bp, Artificial Sequence; identical to SEQ ID NO: 342
  Description of Artificial Sequence: Synthetic polynucleotide

SEQ ID NO: 491 - DNA, 120 bp, Artificial Sequence; identical to SEQ ID NO: 343
  Description of Artificial Sequence: Synthetic polynucleotide

SEQ ID NO: 492 - DNA, 120 bp, Artificial Sequence; identical to SEQ ID NO: 344
  Description of Artificial Sequence: Synthetic polynucleotide

SEQ ID NO: 493 - DNA, 120 bp, Artificial Sequence; identical to SEQ ID NO: 345
  Description of Artificial Sequence: Synthetic polynucleotide

SEQ ID NO: 494 - DNA, 120 bp, Artificial Sequence; identical to SEQ ID NO: 346
  Description of Artificial Sequence: Synthetic polynucleotide

SEQ ID NO: 495 - DNA, 120 bp, Artificial Sequence; identical to SEQ ID NO: 101
  Description of Artificial Sequence: Synthetic polynucleotide

SEQ ID NO: 496 - DNA, 120 bp, Artificial Sequence; identical to SEQ ID NO: 102
  Description of Artificial Sequence: Synthetic polynucleotide

SEQ ID NO: 497 - DNA, 120 bp, Artificial Sequence; identical to SEQ ID NO: 103
  Description of Artificial Sequence: Synthetic polynucleotide

SEQ ID NO: 498 - DNA, 60 bp, Artificial Sequence
  Description of Artificial Sequence: Synthetic oligonucleotide
gcgtgcttgatgcttgtcccttttgatcgtggtgatttagagggtgaactcactggaacg

SEQ ID NO: 499 - DNA, 60 bp, Artificial Sequence
  Description of Artificial Sequence: Synthetic oligonucleotide
gggatgcttgcatgtgtaatcttactaagagctaatagaaaggctaggaccaaacctatt

SEQ ID NO: 500 - DNA, 60 bp, Artificial Sequence
  Description of Artificial Sequence: Synthetic oligonucleotide
gaaattgaccaaccctggggttagtatagcttagttaaactttcgtttattgctaaaggt

SEQ ID NO: 501 - DNA, 60 bp, Artificial Sequence
  Description of Artificial Sequence: Synthetic oligonucleotide
taatcactgctgtttcccgtgggggtgtggctaggctaagcgttttgagctgcattgctg

SEQ ID NO: 502 - DNA, 60 bp, Artificial Sequence
  Description of Artificial Sequence: Synthetic oligonucleotide
actggagttttttacaactcaggtgagttttagctttattggggagggggtgatctaaaa

SEQ ID NO: 503 - DNA, 60 bp, Artificial Sequence
  Description of Artificial Sequence: Synthetic oligonucleotide
cactctttacgccggcttctattgacttgggttaatcgtgtgaccgcggtggctggcacg

SEQ ID NO: 504 - DNA, 60 bp, Artificial Sequence
  Description of Artificial Sequence: Synthetic oligonucleotide
tgttgatttaactgttgaggtttagggctaagcatagtggggtatctaatcccagtttgg

SEQ ID NO: 505 - DNA, 60 bp, Artificial Sequence
  Description of Artificial Sequence: Synthetic oligonucleotide
gtcttagctattgtgtgttcagatatgttaaagccactttcgtagtctattttgtgtcaa

SEQ ID NO: 506 - DNA, 60 bp, Artificial Sequence
  Description of Artificial Sequence: Synthetic oligonucleotide
gaggtggtgaggttgatcggggtttatcgattacagaacaggctcctctagagggatatg

SEQ ID NO: 507 - DNA, 60 bp, Artificial Sequence
  Description of Artificial Sequence: Synthetic oligonucleotide
aagcaccgccaggtcctttgagttttaagctgtggctcgtagtgttctggcgagcagttt

SEQ ID NO: 508 - DNA, 60 bp, Artificial Sequence
  Description of Artificial Sequence: Synthetic oligonucleotide
gcccatttcttgccacctcatgggctacaccttgacctaacgtctttacgtgggtacttg

SEQ ID NO: 509 - DNA, 60 bp, Artificial Sequence
  Description of Artificial Sequence: Synthetic oligonucleotide
cgcttactttgtagccttcatcagggtttgctgaagatggcggtatataggctgagcaag

SEQ ID NO: 510 - DNA, 60 bp, Artificial Sequence
  Description of Artificial Sequence: Synthetic oligonucleotide
tgtgtacgcgcttcagggccctgttcaactaagcactctactctcagtttactgctaaat

SEQ ID NO: 511 - DNA, 60 bp, Artificial Sequence
  Description of Artificial Sequence: Synthetic oligonucleotide
ccaccttcgacccttaagtttcataagggctatcgtagttttctggggtagaaaatgtag

SEQ ID NO: 512 - DNA, 60 bp, Artificial Sequence
  Description of Artificial Sequence: Synthetic oligonucleotide
gttcgtccaagtgcactttccagtacacttaccatgttacgacttgtctcctctatataa

SEQ ID NO: 513 - DNA, 60 bp, Artificial Sequence
  Description of Artificial Sequence: Synthetic oligonucleotide
atgcgtaggggttttagttaaatgtcctttgaagtatacttgaggagggtgacgggcggt

SEQ ID NO: 514 - DNA, 60 bp, Artificial Sequence
  Description of Artificial Sequence: Synthetic oligonucleotide
ttgcggtactatatctattgcgccaggtttcaatttctatcgcctatactttatttgggt

SEQ ID NO: 515 - DNA, 60 bp, Artificial Sequence
  Description of Artificial Sequence: Synthetic oligonucleotide
aaatggtttggttaaggttgtctggtagtaaggtggagtgggtttggggctaggtttagc

SEQ ID NO: 516 - DNA, 60 bp, Artificial Sequence
  Description of Artificial Sequence: Synthetic oligonucleotide
gtttcgggggtcttagctttggctctccttgcaaagttatttctagttaattcattatgc

SEQ ID NO: 517 - DNA, 60 bp, Artificial Sequence
  Description of Artificial Sequence: Synthetic oligonucleotide
agaaggtataggggttagtccttgctatattatgcttggttataatttttcatctttccc

SEQ ID NO: 518 - DNA, 60 bp, Artificial Sequence
  Description of Artificial Sequence: Synthetic oligonucleotide
atcttggacaaccagctatcaccaggctcggtaggtttgtcgcctctacctataaatctt

SEQ ID NO: 519 - DNA, 60 bp, Artificial Sequence
  Description of Artificial Sequence: Synthetic oligonucleotide
cccactattttgctacatagacgggtgtgctcttttagctgttcttaggtagctcgtctg

SEQ ID NO: 520 - DNA, 60 bp, Artificial Sequence
  Description of Artificial Sequence: Synthetic oligonucleotide
ctctctctacaaggttttttcctagtgtccaaagagctgttcctctttggactaacagtt

SEQ ID NO: 521 - DNA, 60 bp, Artificial Sequence
  Description of Artificial Sequence: Synthetic oligonucleotide
aaatttacaaggggatttagagggttctgtgggcaaatttaaagttgaactaagattcta

SEQ ID NO: 522 - DNA, 60 bp, Artificial Sequence
  Description of Artificial Sequence: Synthetic oligonucleotide
ccaattgggtgtgaggagttcagttatatgtttgggattttttaggtagtgggtgttgag

SEQ ID NO: 523 - DNA, 60 bp, Artificial Sequence
  Description of Artificial Sequence: Synthetic oligonucleotide
cttgaacgctttcttaattggtggctgcttttaggcctactatgggtgttaaatttttta

SEQ ID NO: 524 - DNA, 60 bp, Artificial Sequence
  Description of Artificial Sequence: Synthetic oligonucleotide
gtagatattgggctgttaattgtcagttcagtgttttaatctgacgcaggcttatgcgga

SEQ ID NO: 525 - DNA, 60 bp, Artificial Sequence
  Description of Artificial Sequence: Synthetic oligonucleotide
ggagaatgttttcatgttacttatactaacattagttcttctatagggtgatagattggt

SEQ ID NO: 526 - DNA, 60 bp, Artificial Sequence
  Description of Artificial Sequence: Synthetic oligonucleotide
tgtttttggtaaacaggcggggtaagatttgccgagttccttttactttttttaaccttt

SEQ ID NO: 527 - DNA, 60 bp, Artificial Sequence
  Description of Artificial Sequence: Synthetic oligonucleotide
ccttatgagcatgcctgtgttgggttgacagtgagggtaataatgacttgttggttgatt

SEQ ID NO: 528 - DNA, 60 bp, Artificial Sequence
  Description of Artificial Sequence: Synthetic oligonucleotide
tacaggtccctatttaaggaacaagtgattatgctacctttgcacggttagggtaccgcg

SEQ ID NO: 529 - DNA, 60 bp, Artificial Sequence
  Description of Artificial Sequence: Synthetic oligonucleotide
gccgttaaacatgtgtcactgggcaggcggtgcctctaatactggtgatgctagaggtga

SEQ ID NO: 530 - DNA, 60 bp, Artificial Sequence
  Description of Artificial Sequence: Synthetic oligonucleotide
ttaataaattaaagctccatagggtcttctcgtcttgctgtgtcatgcccgcctcttcac

SEQ ID NO: 531 - DNA, 60 bp, Artificial Sequence
  Description of Artificial Sequence: Synthetic oligonucleotide
gggcaggtcaatttcactggttaaaagtaagagacagctgaaccctcgtggagccattca

SEQ ID NO: 532 - DNA, 60 bp, Artificial Sequence
  Description of Artificial Sequence: Synthetic oligonucleotide
tggtgaagtcttagcatgtactgctcggaggttgggttctgctccgaggtcgccccaacc

SEQ ID NO: 533 - DNA, 60 bp, Artificial Sequence
  Description of Artificial Sequence: Synthetic oligonucleotide
gaaatttttaatgcaggtttggtagtttaggacctgtgggtttgttaggtactgtttgca

SEQ ID NO: 534 - DNA, 60 bp, Artificial Sequence
  Description of Artificial Sequence: Synthetic oligonucleotide
gaggtcgtaaaccctattgttgatatggactctagaataggattgcgctgttatccctag

SEQ ID NO: 535 - DNA, 60 bp, Artificial Sequence
  Description of Artificial Sequence: Synthetic oligonucleotide
ggtaacttgttccgttggtcaagttattggatcaattgagtatagtagttcgctttgact

SEQ ID NO: 536 - DNA, 60 bp, Artificial Sequence
  Description of Artificial Sequence: Synthetic oligonucleotide
aagtagatagaaaccgacctggattactccggtctgaactcagatcacgtaggactttaa

SEQ ID NO: 537 - DNA, 60 bp, Artificial Sequence
  Description of Artificial Sequence: Synthetic oligonucleotide
tcgttgaacaaacgaacctttaatagcggctgcaccatcgggatgtcctgatccaacatc

SEQ ID NO: 538 - DNA, 60 bp, Artificial Sequence
  Description of Artificial Sequence: Synthetic oligonucleotide
aaaccctgttcttgggtgggtgtgggtataatactaagttgagatgatatcatttacggg

SEQ ID NO: 539 - DNA, 60 bp, Artificial Sequence
  Description of Artificial Sequence: Synthetic oligonucleotide
ggaaggcgctttgtgaagtaggccttatttctcttgtcctttcgtacagggaggaatttg

SEQ ID NO: 540 - DNA, 60 bp, Artificial Sequence
  Description of Artificial Sequence: Synthetic oligonucleotide
aaggaaccataactgatttaatgagccattcgcagtttcactgtaccggccgtgcgtact

SEQ ID NO: 541 - DNA, 60 bp, Artificial Sequence
  Description of Artificial Sequence: Synthetic oligonucleotide
cagacatgcatggcttaatctttgagacaagcatatgctactggcaggatcaaccaggta

SEQ ID NO: 542 - DNA, 60 bp, Artificial Sequence
  Description of Artificial Sequence: Synthetic oligonucleotide
gttggttttgatctgataaatgcacgcatcccccccgcgaagggggtcagcgcccgtcgg

SEQ ID NO: 543 - DNA, 60 bp, Artificial Sequence
  Description of Artificial Sequence: Synthetic oligonucleotide
catgtattagctctagaattaccacagttatccaagtaggagaggagcgagcgaccaaag

SEQ ID NO: 544 - DNA, 60 bp, Artificial Sequence
  Description of Artificial Sequence: Synthetic oligonucleotide
gacgttcgaatgggtcgtcgccgccacggggggcgtgcgatcggcccgaggttatctaga

SEQ ID NO: 545 - DNA, 60 bp, Artificial Sequence
  Description of Artificial Sequence: Synthetic oligonucleotide
gtcaccaaagccgccggcgcccgccccccggccggggccggagaggggctgaccgggttg

SEQ ID NO: 546 - DNA, 60 bp, Artificial Sequence
  Description of Artificial Sequence: Synthetic oligonucleotide
cttccttggatgtggtagccgtttctcaggctccctctccggaatcgaaccctgattccc

SEQ ID NO: 547 - DNA, 60 bp, Artificial Sequence
  Description of Artificial Sequence: Synthetic oligonucleotide
cgtcacccgtggtcaccatggtaggcacggcgactaccatcgaaagttgatagggcagac

SEQ ID NO: 548 - DNA, 60 bp, Artificial Sequence
  Description of Artificial Sequence: Synthetic oligonucleotide
cgttaaaggatttaaagtggactcattccaattacagggcctcgaaagagtcctgtattg

SEQ ID NO: 549 - DNA, 60 bp, Artificial Sequence
  Description of Artificial Sequence: Synthetic oligonucleotide
ttatttttcgtcactacctccccgggtcgggagtgggtaatttgcgcgcctgctgccttc

SEQ ID NO: 550 - DNA, 60 bp, Artificial Sequence
  Description of Artificial Sequence: Synthetic oligonucleotide
gcccgcccgctcccaagatccaactacgagctttttaactgcagcaactttaatatacgc

SEQ ID NO: 551 - DNA, 60 bp, Artificial Sequence
  Description of Artificial Sequence: Synthetic oligonucleotide
tattggagctggaattaccgcggctgctggcaccagacttgccctccaatggatcctcgt

SEQ ID NO: 552 - DNA, 60 bp, Artificial Sequence
  Description of Artificial Sequence: Synthetic oligonucleotide
actctaattttttcaaagtaaacgcttcgggccccgcgggacactcagctaagagcatcg

SEQ ID NO: 553 - DNA, 60 bp, Artificial Sequence
  Description of Artificial Sequence: Synthetic oligonucleotide
agggggcgccgagaggcaaggggcggggacgggcggtggctcgcctcgcggcggaccgcc

SEQ ID NO: 554 - DNA, 60 bp, Artificial Sequence
  Description of Artificial Sequence: Synthetic oligonucleotide
cccccggccgtccctcttaatcatggcctcagttccgaaaaccaacaaaatagaaccgcg

SEQ ID NO: 555 - DNA, 60 bp, Artificial Sequence
  Description of Artificial Sequence: Synthetic oligonucleotide
gtcctattccattattcctagctgcggtatccaggcggctcgggcctgctttgaacactc

SEQ ID NO: 556 - DNA, 60 bp, Artificial Sequence
  Description of Artificial Sequence: Synthetic oligonucleotide
gtcttcgaacctccgactttcgttcttgattaatgaaaacattcttggcaaatgctttcg

SEQ ID NO: 557 - DNA, 60 bp, Artificial Sequence
  Description of Artificial Sequence: Synthetic oligonucleotide
ctctggtccgtcttgcgccggtccaagaatttcacctctagcggcgcaatacgaatgccc

SEQ ID NO: 558 - DNA, 60 bp, Artificial Sequence
  Description of Artificial Sequence: Synthetic oligonucleotide
ccccccggaacccaaagactttggtttcccggaagctgcccggcgggtcatgggaataac

SEQ ID NO: 559 - DNA, 60 bp, Artificial Sequence
  Description of Artificial Sequence: Synthetic oligonucleotide
gccgccgcatcgccggtcggcatcgtttatggtcggaactacgacggtatctgatcgtct

SEQ ID NO: 560 - DNA, 60 bp, Artificial Sequence
  Description of Artificial Sequence: Synthetic oligonucleotide
cctgtccgtgtccgggccgggtgaggtttcccgtgttgagtcaaattaagccgcaggctc

SEQ ID NO: 561 - DNA, 60 bp, Artificial Sequence
  Description of Artificial Sequence: Synthetic oligonucleotide
cactcctggtggtgcccttccgtcaattcctttaagtttcagctttgcaaccatactccc

SEQ ID NO: 562 - DNA, 60 bp, Artificial Sequence
  Description of Artificial Sequence: Synthetic oligonucleotide
gttagcatgccagagtctcgttcgttatcggaattaaccagacaaatcgctccaccaact

SEQ ID NO: 563 - DNA, 60 bp, Artificial Sequence
  Description of Artificial Sequence: Synthetic oligonucleotide
aagaacggccatgcaccaccacccacggaatcgagaaagagctatcaatctgtcaatcct

SEQ ID NO: 564 - DNA, 60 bp, Artificial Sequence
  Description of Artificial Sequence: Synthetic oligonucleotide
agccccggacatctaagggcatcacagacctgttattgctcaatctcgggtggctgaacg

SEQ ID NO: 565 - DNA, 60 bp, Artificial Sequence
  Description of Artificial Sequence: Synthetic oligonucleotide
ccacttgtccctctaagaagttgggggacgccgaccgctcgggggtcgcgtaactagtta

SEQ ID NO: 566 - DNA, 60 bp, Artificial Sequence
  Description of Artificial Sequence: Synthetic oligonucleotide
cgttcatggggaataattgcaatccccgatccccatcacgaatggggttcaacgggttac

SEQ ID NO: 567 - DNA, 60 bp, Artificial Sequence
  Description of Artificial Sequence: Synthetic oligonucleotide
ccgcgcctgccggcgtagggtaggcacacgctgagccagtcagtgtagcgcgcgtgcagc

SEQ ID NO: 568 - DNA, 60 bp, Artificial Sequence
  Description of Artificial Sequence: Synthetic oligonucleotide
gggccgatccgagggcctcactaaaccatccaatcggtagtagcgacgggcggtgtgtac

SEQ ID NO: 569 - DNA, 60 bp, Artificial Sequence
  Description of Artificial Sequence: Synthetic oligonucleotide
aaagggcagggacttaatcaacgcaagcttatgacccgcacttactgggaattcctcgtt

SEQ ID NO: 570 - DNA, 60 bp, Artificial Sequence
  Description of Artificial Sequence: Synthetic oligonucleotide
taatgatccttccgcaggttcacctacggaaaccttgttacgacttttacttcctctaga

SEQ ID NO: 571 - DNA, 60 bp, Artificial Sequence
  Description of Artificial Sequence: Synthetic oligonucleotide
tagtcaagttcgaccgtcttctcagcgctccgccagggccgtgggccgaccccggcgggg

SEQ ID NO: 572 - DNA, 60 bp, Artificial Sequence
  Description of Artificial Sequence: Synthetic oligonucleotide
tcggcgctgggctcttccctgttcactcgccgttactgagggaatcctggttagtttctt

SEQ ID NO: 573 - DNA, 60 bp, Artificial Sequence
  Description of Artificial Sequence: Synthetic oligonucleotide
ctcctccgctgactaatatgcttaaattcagcgggtcgccacgtctgatctgaggtcgcg

SEQ ID NO: 574 - DNA, 60 bp, Artificial Sequence
  Description of Artificial Sequence: Synthetic oligonucleotide
tccacgggctgggcctcgatcagaaggacttgggccccccacgagcggcgccggggagcg

SEQ ID NO: 575 - DNA, 60 bp, Artificial Sequence
  Description of Artificial Sequence: Synthetic oligonucleotide
ggtcttccgtacgccacatgtcccgcgccccgccgcggggcggggattcggcgctgggct

SEQ ID NO: 576 - DNA, 60 bp, Artificial Sequence
  Description of Artificial Sequence: Synthetic oligonucleotide
tagccttagatggagtttaccacccgctttgggctgcattcccaagcaacccgactccgg

SEQ ID NO: 577 - DNA, 60 bp, Artificial Sequence
  Description of Artificial Sequence: Synthetic oligonucleotide
gaagacccgggcccggcgcgccgggggccgctaccggcctcacaccgtccacgggctggg

SEQ ID NO: 578 - DNA, 60 bp, Artificial Sequence
  Description of Artificial Sequence: Synthetic oligonucleotide
cacccgtttacctcttaacggtttcacgccctcttgaactctctcttcaaagttcttttc

SEQ ID NO: 579 - DNA, 60 bp, Artificial Sequence
  Description of Artificial Sequence: Synthetic oligonucleotide
aactttcccttacggtacttgttgactatcggtctcgtgccggtatttagccttagatgg

SEQ ID NO: 580 - DNA, 60 bp, Artificial Sequence
  Description of Artificial Sequence: Synthetic oligonucleotide
cgggtggaggggtcgggaggaacggggggcgggaaagatccgccgggccgccgacacggc

SEQ ID NO: 581 - DNA, 60 bp, Artificial Sequence
  Description of Artificial Sequence: Synthetic oligonucleotide
cggacccgccgccgggttgaatcctccgggcggactgcgcggaccccacccgtttacctc

SEQ ID NO: 582 - DNA, 60 bp, Artificial Sequence
  Description of Artificial Sequence: Synthetic oligonucleotide
ccccccgagccaccttccccgccgggccttcccagccgtcccggagccggtcgcggcgca

SEQ ID NO: 583 - DNA, 60 bp, Artificial Sequence
  Description of Artificial Sequence: Synthetic oligonucleotide
ccgccgcggtggaaatgcgcccggcggcggccggtcgccggtcgggggacggtcccccgc

SEQ ID NO: 584 - DNA, 60 bp, Artificial Sequence
  Description of Artificial Sequence: Synthetic oligonucleotide
gaggggggagagcgcggcgacgggtctcgctccctcggccccgggattcggcgagtgctg

SEQ ID NO: 585 - DNA, 60 bp, Artificial Sequence
  Description of Artificial Sequence: Synthetic oligonucleotide
ctgccgggggggctgtaacactcggggggggtttcggtcccgccgccgccgccgccgccg

SEQ ID NO: 586 - DNA, 60 bp, Artificial Sequence
  Description of Artificial Sequence: Synthetic oligonucleotide
gcacgtgttagactccttggtccgtgtttcaagacgggtcgggtgggtagccgacgtcgc

SEQ ID NO: 587 - DNA, 60 bp, Artificial Sequence
  Description of Artificial Sequence: Synthetic oligonucleotide
cgccgaccccgtgcgctcgctccgccgtccccctcttcgggggacgcgcgcgtggccccg

SEQ ID NO: 588 - DNA, 60 bp, Artificial Sequence
  Description of Artificial Sequence: Synthetic oligonucleotide
cgggccggtggtgcgccctcggcggactggagaggcctcgggatcccacctcggccggcg

SEQ ID NO: 589 - DNA, 60 bp, Artificial Sequence
  Description of Artificial Sequence: Synthetic oligonucleotide
agcgcgccggccttcaccttcattgcgccacggcggctttcgtgcgagcccccgactcgc

SEQ ID NO: 590 - DNA, 60 bp, Artificial Sequence
  Description of Artificial Sequence: Synthetic oligonucleotide
ggaccgctacggacctccaccagagtttcctctggcttcgccctgcccaggcatagttca

SEQ ID NO: 591 - DNA, 60 bp, Artificial Sequence
  Description of Artificial Sequence: Synthetic oligonucleotide
ccatctttcgggtcctaacacgtgcgctcgtgctccacctccccggcgcggcgggcgaga

SEQ ID NO: 592 - DNA, 60 bp, Artificial Sequence
  Description of Artificial Sequence: Synthetic oligonucleotide
tgcgtcgggtctgcgagagcgccagctatcctgagggaaacttcggagggaaccagctac

SEQ ID NO: 593 - DNA, 60 bp, Artificial Sequence
  Description of Artificial Sequence: Synthetic oligonucleotide
tagatggttcgattagtctttcgcccctatacccaggtcggacgaccgatttgcacgtca

SEQ ID NO: 594 - DNA, 60 bp, Artificial Sequence
  Description of Artificial Sequence: Synthetic oligonucleotide
ccggctccacgccagcgagccgggcttcttacccatttaaagtttgagaataggttgaga

SEQ ID NO: 595 - DNA, 60 bp, Artificial Sequence
  Description of Artificial Sequence: Synthetic oligonucleotide
tcgtttcggccccaagacctctaatcattcgctttaccggataaaactgcgtggcggggg

SEQ ID NO: 596 - DNA, 60 bp, Artificial Sequence
  Description of Artificial Sequence: Synthetic oligonucleotide
aacaccttttctggggtctgatgagcgtcggcatcgggcgccttaacccggcgttcggtt

SEQ ID NO: 597 - DNA, 60 bp, Artificial Sequence
  Description of Artificial Sequence: Synthetic oligonucleotide
catcccgcagcgccagttctgcttaccaaaagtggcccactaggcactcgcattccacgc

SEQ ID NO: 598 - DNA, 60 bp, Artificial Sequence
  Description of Artificial Sequence: Synthetic oligonucleotide
atgggcccgacgctccagcgccatccattttcagggctagttgattcggcaggtgagttg

SEQ ID NO: 599 - DNA, 60 bp, Artificial Sequence
  Description of Artificial Sequence: Synthetic oligonucleotide
ttacacactccttagcggattccgacttccatggccaccgtcctgctgtctatatcaacc

SEQ ID NO: 600 - DNA, 60 bp, Artificial Sequence
  Description of Artificial Sequence: Synthetic oligonucleotide
gaaggaccccacacccccgccgccgccgccgccgccgccctccgacgcacaccacacgcg

SEQ ID NO: 601 - DNA, 60 bp, Artificial Sequence
  Description of Artificial Sequence: Synthetic oligonucleotide
cgcgcgcgcgcgccgcccccgccgctcccgtccactctcgactgccggcgacggccgggt

SEQ ID NO: 602 - DNA, 60 bp, Artificial Sequence
  Description of Artificial Sequence: Synthetic oligonucleotide
gcttcaaggctcaccgcagcggccctcctactcgtcgcggcgtagcgtccgcggggctcc

SEQ ID NO: 603 - DNA, 60 bp, Artificial Sequence
  Description of Artificial Sequence: Synthetic oligonucleotide
gggggcggggagcggggcgtgggcgggaggaggggaggaggcgtgggggggggggcgggg

SEQ ID NO: 604 - DNA, 60 bp, Artificial Sequence
  Description of Artificial Sequence: Synthetic oligonucleotide
gttcaactgctgttcacatggaacccttctccacttcggccttcaaagttctcgtttgaa

SEQ ID NO: 605 - DNA, 60 bp, Artificial Sequence
  Description of Artificial Sequence: Synthetic oligonucleotide
tatttgctactaccaccaagatctgcacctgcggcggctccacccgggcccgcgccctag

SEQ ID NO: 606 - DNA, 60 bp, Artificial Sequence
  Description of Artificial Sequence: Synthetic oligonucleotide
ccgccactccggattcggggatctgaacccgactccctttcgatcggccgagggcaacgg

SEQ ID NO: 607 - DNA, 60 bp, Artificial Sequence
  Description of Artificial Sequence: Synthetic oligonucleotide
aggccatcgcccgtcccttcggaacggcgctcgcccatctctcaggaccgactgacccat

SEQ ID NO: 608 - DNA, 60 bp, Artificial Sequence
  Description of Artificial Sequence: Synthetic oligonucleotide
ggcgaacccattccagggcgccctgcccttcacaaagaaaagagaactctccccggggct

SEQ ID NO: 609 - DNA, 60 bp, Artificial Sequence
  Description of Artificial Sequence: Synthetic oligonucleotide
cccgccggcttctccgggatcggtcgcgttaccgcactggacgcctcgcggcgcccatct

SEQ ID NO: 610 - DNA, 60 bp, Artificial Sequence
  Description of Artificial Sequence: Synthetic oligonucleotide
atatgggtacggcccggcgcgagatttacaccctctcccccggattttcaagggccagcg

SEQ ID NO: 611 - DNA, 60 bp, Artificial Sequence
  Description of Artificial Sequence: Synthetic oligonucleotide
agagctcaccggacgccgccggaaccgcgacgctttccaaggcacgggcccctctctcgg

SEQ ID NO: 612 - DNA, 60 bp, Artificial Sequence
  Description of Artificial Sequence: Synthetic oligonucleotide
cgaccgacccagcccttagagccaatccttatcccgaagttacggatccggcttgccgac

SEQ ID NO: 613 - DNA, 60 bp, Artificial Sequence
  Description of Artificial Sequence: Synthetic oligonucleotide
ttcccttacctacattgttccaacatgccagaggctgttcaccttggagacctgctgcgg

SEQ ID NO: 614 - DNA, 60 bp, Artificial Sequence
  Description of Artificial Sequence: Synthetic oligonucleotide
gcccctgccgccccgacccttctccccccgccgccgcccccacgcggcgctcccccgggg

SEQ ID NO: 615 - DNA, 60 bp, Artificial Sequence
  Description of Artificial Sequence: Synthetic oligonucleotide
aggggggaggacggggagcgggggagagagagagagagagggcgcggggcggggagggag

SEQ ID NO: 616 - DNA, 60 bp, Artificial Sequence
  Description of Artificial Sequence: Synthetic oligonucleotide
ttcccctggtccgcaccagttctaagtcggctgctaggcgccggccgaggcgaggcgccg

SEQ ID NO: 617 - DNA, 60 bp, Artificial Sequence
  Description of Artificial Sequence: Synthetic oligonucleotide
cgcggaaccgcggccccgggggcggacccggcgggggggaccggcccgcggcccctccgc

SEQ ID NO: 618 - DNA, 60 bp, Artificial Sequence
  Description of Artificial Sequence: Synthetic oligonucleotide
cgtttacccgcgcttcattgaatttcttcactttgacattcagagcactgggcagaaatc

SEQ ID NO: 619 - DNA, 60 bp, Artificial Sequence
  Description of Artificial Sequence: Synthetic oligonucleotide
acatcgcgtcaacacccgccgcgggccttcgcgatgctttgttttaattaaacagtcgga

SEQ ID NO: 620 - DNA, 60 bp, Artificial Sequence
  Description of Artificial Sequence: Synthetic oligonucleotide
ggctgtggtttcgctggatagtaggtagggacagtgggaatctcgttcatccattcatgc

SEQ ID NO: 621 - DNA, 60 bp, Artificial Sequence
  Description of Artificial Sequence: Synthetic oligonucleotide
gcgtcactaattagatgacgaggcatttggctaccttaagagagtcatagttactcccgc

SEQ ID NO: 622 - DNA, 60 bp, Artificial Sequence
  Description of Artificial Sequence: Synthetic oligonucleotide
gggggggcgccgggggcctcccacttattctacacctctcatgtctcttcaccgtgccag

SEQ ID NO: 623 - DNA, 60 bp, Artificial Sequence
  Description of Artificial Sequence: Synthetic oligonucleotide
actagagtcaagctcaacagggtcttctttccccgctgattccgccaagcccgttccctt

SEQ ID NO: 624 - DNA, 60 bp, Artificial Sequence
  Description of Artificial Sequence: Synthetic oligonucleotide
gcccctcggggctcgcccccccgcctcaccgggtcagtgaaaaaacgatcagagtagtgg

SEQ ID NO: 625 - DNA, 60 bp, Artificial Sequence
  Description of Artificial Sequence: Synthetic oligonucleotide
tatttcaccggcggcccgcagggccggcggaccccgccccgggcccctcgcggggacacc

SEQ ID NO: 626 - DNA, 60 bp, Artificial Sequence
  Description of Artificial Sequence: Synthetic oligonucleotide
gacacctgcgttaccgtttgacaggtgtaccgccccagtcaaactccccacctggcactg

SEQ ID NO: 627 - DNA, 60 bp, Artificial Sequence
  Description of Artificial Sequence: Synthetic oligonucleotide
tccccggagcgggtcgcgcccggccggcgcgcggccgggcgcttggcgccagaagcgaga

SEQ ID NO: 628 - DNA, 60 bp, Artificial Sequence
  Description of Artificial Sequence: Synthetic oligonucleotide
ggtcagaaggatcgtgaggccccgctttcacggtctgtattcgtactgaaaatcaagatc

SEQ ID NO: 629 - DNA, 60 bp, Artificial Sequence
  Description of Artificial Sequence: Synthetic oligonucleotide
aagcgagcttttgcccttctgctccacgggaggtttctgtcctccctgagctcgccttag

SEQ ID NO: 630 - DNA, 60 bp, Artificial Sequence
  Description of Artificial Sequence: Synthetic oligonucleotide
caatgataggaagagccgacatcgaaggatcaaaaagcgacgtcgctatgaacgcttggc

SEQ ID NO: 631 - DNA, 60 bp, Artificial Sequence
  Description of Artificial Sequence: Synthetic oligonucleotide
cgccacaagccagttatccctgtggtaacttttctgacacctcctgcttaaaacccaaaa

SEQ ID NO: 632 - DNA, 60 bp, Artificial Sequence
  Description of Artificial Sequence: Synthetic oligonucleotide
ttaccatggcaacaacacatcatcagtagggtaaaactaacctgtctcacgacggtctaa

SEQ ID NO: 633 - DNA, 60 bp, Artificial Sequence
  Description of Artificial Sequence: Synthetic oligonucleotide
acccagctcacgttccctattagtgggtgaacaatccaacgcttggtgaattctgcttca

SEQ ID NO: 634 - DNA, 60 bp, Artificial Sequence
  Description of Artificial Sequence: Synthetic oligonucleotide
gattctgacttagaggcgttcagtcataatcccacagatggtagcttcgccccattggct

SEQ ID NO: 635 - DNA, 60 bp, Artificial Sequence
  Description of Artificial Sequence: Synthetic oligonucleotide
cctcagccaagcacatacaccaaatgtctgaacctgcggttcctctcgtactgagcagga

SEQ ID NO: 636 - DNA, 60 bp, Artificial Sequence
  Description of Artificial Sequence: Synthetic oligonucleotide
tcccgcgcgcgcggggcgcgtggagggggggggcggcccgccggcggggacaggcggggg

SEQ ID NO: 637 - DNA, 60 bp, Artificial Sequence
  Description of Artificial Sequence: Synthetic oligonucleotide
accggctatccgaggccaaccgaggctccgcggcgctgccgtatcgttccgcctgggcgg

SEQ ID NO: 638 - DNA, 60 bp, Artificial Sequence
  Description of Artificial Sequence: Synthetic oligonucleotide
acgaacgtgcggtgcgtgacgggcgagggggcggccgcctctccggccgcgccccgtttc

SEQ ID NO: 639 - DNA, 60 bp, Artificial Sequence
  Description of Artificial Sequence: Synthetic oligonucleotide
ccaggacgaagggcactccgcaccggaccccggtcccggcgcgcggcggggcacgcgccc

SEQ ID NO: 640 - DNA, 60 bp, Artificial Sequence
  Description of Artificial Sequence: Synthetic oligonucleotide
gacaaacccttgtgtcgagggctgactttcaatagatcgcagcgagggagctgctctgct

SEQ ID NO: 641 - DNA, 60 bp, Artificial Sequence
  Description of Artificial Sequence: Synthetic oligonucleotide
acgtacgaaaccccgacccagaagcaggtcgtctacgaatggtttagcgccaggttcccc

SEQ ID NO: 642 - DNA, 60 bp, Artificial Sequence
  Description of Artificial Sequence: Synthetic oligonucleotide
cgggaggaacccggggccgcaagtgcgttcgaagtgtcgatgatcaatgtgtcctgcaat

SEQ ID NO: 643 - DNA, 60 bp, Artificial Sequence
  Description of Artificial Sequence: Synthetic oligonucleotide
tcacattaattctcgcagctagctgcgttcttcatcgacgcacgagccgagtgatccacc

SEQ ID NO: 644 - DNA, 60 bp, Artificial Sequence
  Description of Artificial Sequence: Synthetic oligonucleotide
aagcctacagcacccggtattcccaggcggtctcccatccaagtactaaccaggcccgac

SEQ ID NO: 645 - DNA, 60 bp, Artificial Sequence
  Description of Artificial Sequence: Synthetic oligonucleotide
cctgcttagcttccgagatcagacgagatcgggcgcgttcagggtggtatggccgtagac

SEQ ID NO: 646 - DNA, 1210 bp, Homo sapiens
gtctgacgggcgatggcgcagccaatagacaggagcgctatccgcggtttctgattggctactttgttcgcattataaaaggcacgcgcgggcgcgaggcccttctctcgccaggcgtcctcgtggaagtgacatcgtctttaaaccctgcgtggcaatccctgacgcaccgccgtgatgcccagggaagacagggcgacctggaagtccaactacttccttaagatcatccaactattggatgattatccgaaatgtttcattgtgggagcagacaatgtgggctccaagcagatgcagcagatccgcatgtcccttcgcgggaaggctgtggtgctgatgggcaagaacaccatgatgcgcaaggccatccgagggcacctggaaaacaacccagctctggagaaactgctgcctcatatccgggggaatgtgggctttgtgttcaccaaggaggacctcactgagatcagggacatgttgctggccaataaggtgccagctgctgcccgtgctggtgccattgccccatgtgaagtcactgtgccagcccagaacactggtctcgggcccgagaagacctcctttttccaggctttaggtatcaccactaaaatctccaggggcaccattgaaatcctgagtgatgtgcagctgatcaagactggagacaaagtgggagccagcgaagccacgctgctgaacatgctcaacatctcccccttctcctttgggctggtcatccagcaggtgttcgacaatggcagcatctacaaccctgaagtgcttgatatcacagaggaaactctgcattctcgcttcctggagggtgtccgcaatgttgccagtgtctgtctgcagattggctacccaactgttgcatcagtaccccattctatcatcaacgggtacaaacgagtcctggccttgtctgtggagacggattacaccttcccacttgctgaaaaggtcaaggccttcttggctgatccatctgcctttgtggctgctgcccctgtggctgctgccaccacagctgctcctgctgctgctgcagccccagctaaggttgaagccaaggaagagtcggaggagtcggacgaggatatgggatttggtctctttgactaatcaccaaaaagcaaccaacttagccagttttatttgcaaaacaaggaaataaaggcttacttctttaaaaagtaaaaaa

SEQ ID NO: 647 - DNA, 512 bp, Homo sapiens
cctttcctcagctgccgccaaggtgctcggtccttccgaggaagctaaggctgcgttggggtgaggccctcacttcatccggcgactagcaccgcgtccggcagcgccagccctacactcgcccgcgccatggcctctgtctccgagctcgcctgcatctactcggccctcattctgcacgacgatgaggtgacagtcacggaggataagatcaatgccctcattaaagcagccggtgtaaatgttgagcctttttggcctggcttgtttgcaaaggccctggccaacgtcaacattgggagcctcatctgcaatgtaggggccggtggacctgctccagcagctggtgctgcaccagcaggaggtcctgccccctccactgctgctgctccagctgaggagaagaaagtggaagcaaagaaagaagaatccgaggagtctgatgatgacatgggctttggtctttttgactaaacctcttttataacatgttcaataaaaagctgaacttt

SEQ ID NO: 648 - DNA, 495 bp, Homo sapiens
ggtttaaccccgcctcttgcgtcggcgccttccttttcctccctgtcgccaccgaggtcgcacgcgtgagacttctccgccgcctccgccgcagacgccgccgcgatgcgctacgtcgcctcctacctgctggctgccctagggggcaactcctcccccagcgccaaggacatcaagaagatcttggacagcgtgggtatcgaggcggacgacgaccggctcaacaaggttatcagtgagctgaatggaaaaaacattgaagacgtcattgcccagggtattggcaagcttgccagtgtacctgctggtggggctgtagccgtctctgctgccccaggctctgcagcccctgctgctggttctgcccctgctgcagcagaggagaagaaagatgagaagaaggaggagtctgaagagtcagatgatgacatgggatttggcctttttgattaaattcctgctcccctgcaaataaagcctttttacacatctcaa

SEQ ID NO: 649 - DNA, 1340 bp, Homo sapiens
ccagatttggctttatatagcggacccgtaaggccgaccggcctctaccggcgggatttgatggcgtgatgtctcacagaaagttctccgctcccagacatgggtccctcggcttcctgcctcggaagcgcagcagcaggcatcgtgggaaggtgaagagcttccctaaggatgacccgtccaagccggtccacctcacagccttcctgggatacaaggctggcatgactcacatcgtgcgggaagtcgacaggccgggatccaaggtgaacaagaaggaggtggtggaggctgtgaccattgtagagacaccacccatggtggttgtgggcattgtgggctacgtggaaacccctcgaggcctccggaccttcaagactgtctttgctgagcacatcagtgatgaatgcaagaggcgtttctataagaattggcataaatctaagaagaaggcctttaccaagtactgcaagaaatggcaggatgaggatggcaagaagcagctggagaaggacttcagcagcatgaagaagtactgccaagtcatccgtgtcattgcccacacccagatgcgcctgcttcctctgcgccagaagaaggcccacctgatggagatccaggtgaacggaggcactgtggccgagaagctggactgggcccgcgagaggcttgagcagcaggtacctgtgaaccaagtgtttgggcaggatgagatgatcgacgtcatcggggtgaccaagggcaaaggctacaaaggggtcaccagtcgttggcacaccaagaagctgccccgcaagacccaccgaggcctgcgcaaggtggcctgtattggggcatggcatcctgctcgtgtagccttctctgtggcacgcgctgggcagaaaggctaccatcaccgcactgagatcaacaagaagatttataagattggccagggctaccttatcaaggacggcaagctgatcaagaacaatgcctccactgactatgacctatctgacaagagcatcaaccctctgggtggctttgtccactatggtgaagtgaccaatgactttgtcatgctgaaaggctgtgtggtgggaaccaagaagcgggtgctcaccctccgcaagtccttgctggtgcagacgaagcggcgggctctggagaagattgaccttaagttcattgacaccacctccaagtttggccatggccgcttccagaccatggaggagaagaaagcattcatgggaccactgaagaaagaccgaattgcaaaggaagaaggagcttaatgccaggaacagattttgcagttggtggggtctcaataaaagttattttccactgacaaa

SEQ ID NO: 650 - DNA, 1440 bp, Homo sapiens
aagcacttccttttcctgtggcagcagccgggctgagaggagcgtggctgtctcctctctccgccatggcgtgtgctcgcccactgatatcggtgtactccgaaaagggggagtcatctggcaaaaatgtcactttgcctgctgtattcaaggctcctattcgaccagatattgtgaactttgttcacaccaacttgcgcaaaaacaacagacagccctatgctgtcagtgaattagcaggtcatcagactagtgctgagtcttggggtactggcagagctgtggctcgaattcccagagttcgaggtggtgggactcaccgctctggccagggtgcttttggaaacatgtgtcgtggaggccgaatgtttgcaccaaccaaaacctggcgccgttggcatcgtagagtgaacacaacccaaaaacgatacgccatctgttctgccctggctgcctcagccctaccagcactggtcatgtctaaaggtcatcgtattgaggaagttcctgaacttcctttggtagttgaagataaagttgaaggctacaagaagaccaaggaagctgttttgctccttaagaaacttaaagcctggaatgatatcaaaaaggtctatgcctctcagcgaatgagagctggcaaaggcaaaatgagaaaccgtcgccgtatccagcgcaggggcccgtgcatcatctataatgaggataatggtatcatcaaggccttcagaaacatccctggaattactctgcttaatgtaagcaagctgaacattttgaagcttgctcctggtgggcatgtgggacgtttctgcatttggactgaaagtgctttccggaagttagatgaattgtacggcacttggcgtaaagccgcttccctcaagagtaactacaatcttcccatgcacaagatgattaatacagatcttagcagaatcttgaaaagcccagagatccaaagagcccttcgagcaccacgcaagaagatccatcgcagagtcctaaagaagaacccactgaaaaacttgagaatcatgttgaagctaaacccatatgcaaagaccatgcgccggaacaccattcttcgccaggccaggaatcacaagctccgggtggataaggcagctgctgcagcagcggcactacaagccaaatcagatgagaaggcggcggttgcaggcaagaagcctgtggtaggtaagaaaggaaagaaggctgctgttggtgttaagaagcagaagaagcctctggtgggaaaaaaggcagcagctaccaagaaaccagcccctgaaaagaagcctgcagagaagaaacctactacagaggagaagaagcctgctgcataaactcttaaatttgattattccataaaggtcaaatcattttggacagcttcttttgaataaagacctgattatacaggcagtgagaaacatg

SEQ ID NO: 651 - DNA, 1035 bp, Homo sapiens
ggcccttttcccaccccctagcgccgctgggcctgcaggtctctgtcgagcagcggacgccggtctctgttccgcaggatggggtttgttaaagttgttaagaataaggcctactttaagagataccaagtgaaatttagaagacgacgagagggtaaaactgattattatgctcggaaacgcttggtgatacaagataaaaataaatacaacacacccaaatacaggatgatagttcgtgtgacaaacagagatatcatttgtcagattgcttatgcccgtatagagggggatatgatagtctgcgcagcgtatgcacacgaactgccaaaatatggtgtgaaggttggcctgacaaattatgctgcagcatattgtactggcctgctgctggcccgcaggcttctcaataggtttggcatggacaagatctatgaaggccaagtggaggtgactggtgatgaatacaatgtggaaagcattgatggtcagccaggtgccttcacctgctatttggatgcaggccttgccagaactaccactggcaataaagtttttggtgccctgaagggagctgtggatggaggcttgtctatccctcacagtaccaaacgattccctggttatgattctgaaagcaaggaatttaatgcagaagtacatcggaagcacatcatgggccagaatgttgcagattacatgcgctacttaatggaagaagatgaagatgcttacaagaaacagttctctcaatacataaagaacagcgtaactccagacatgatggaggagatgtataagaaagctcatgctgctatacgagagaatccagtctatgaaaagaagcccaagaaagaagttaaaaagaagaggtggaaccgtcccaaaatgtcccttgctcagaagaaggatcgggtagctcaaaagaaggcaagcttcctcagagctcaggagcgggctgctgagagctaaacccagcaattttctatgattttttcagatatagataataaacttatgaacagcaactaaaaa

SEQ ID NO: 652 - DNA, 960 bp, Homo sapiens
gattgcttatagaccggaagccgggaccttaattctctttcccatcttgcaagatggcgggtgaaaaagttgagaagccagatactaaagagaagaaacccgaagccaagaaggttgatgctggtggcaaggtgaaaaagggtaacctcaaagctaaaaagcccaagaaggggaagccccattgcagccgcaaccctgtccttgtcagaggaattggcaggtattcccgatctgccatgtattccagaaaggccatgtacaagaggaagtactcagccgctaaatccaaggttgaaaagaaaaagaaggagaaggttctcgcaactgttacaaaaccagttggtggtgacaagaacggcggtacccgggtggttaaacttcgcaaaatgcctagatattatcctactgaagatgtgcctcgaaagctgttgagccacggcaaaaaacccttcagtcagcacgtgagaaaactgcgagccagcattacccccgggaccattctgatcatcctcactggacgccacaggggcaagagggtggttttcctgaagcagctggctagtggcttattacttgtgactggacctctggtcctcaatcgagttcctctacgaagaacacaccagaaatttgtcattgccacttcaaccaaaatcgatatcagcaatgtaaaaatcccaaaacatcttactgatgcttacttcaagaagaagaagctgcggaagcccagacaccaggaaggtgagatcttcgacacagaaaaagagaaatatgagattacggagcagcgcaagattgatcagaaagctgtggactcacaaattttaccaaaaatcaaagctattcctcagctccagggctacctgcgatctgtgtttgctctgacgaatggaatttatcctcacaaattggtgttctaaatgtcttaagaacctaattaaatagctgactacaaaaaaa

SEQ ID NO: 653 - DNA, 840 bp, Homo sapiens
tcctctttttccggctggaaccatggagggtgtagaagagaagaagaaggaggttcctgctgtgccagaaacccttaagaaaaagcgaaggaatttcgcagagctgaagatcaagcgcctgagaaagaagtttgcccaaaagatgcttcgaaaggcaaggaggaagcttatctatgaaaaagcaaagcactatcacaaggaatataggcagatgtacagaactgaaattcgaatggcgaggatggcaagaaaagctggcaacttctatgtacctgcagaacccaaattggcgtttgtcatcagaatcagaggtatcaatggagtgagcccaaaggttcgaaaggtgttgcagcttcttcgccttcgtcaaatcttcaatggaacctttgtgaagctcaacaaggcttcgattaacatgctgaggattgtagagccatatattgcatgggggtaccccaatctgaagtcagtaaatgaactaatctacaagcgtggttatggcaaaatcaataagaagcgaattgctttgacagataacgctttgattgctcgatctcttggtaaatacggcatcatctgcatggaggatttgattcatgagatctatactgttggaaaacgcttcaaagaggcaaataacttcctgtggcccttcaaattgtcttctccacgaggtggaatgaagaaaaagaccacccattttgtagaaggtggagatgctggcaacagggaggaccagatcaacaggcttattagaagaatgaactaaggtgtctaccatgattatttttctaagctggttggttaataaacagtacctgctctcaaattgaaataaaa

SEQ ID NO: 654 - DNA, 890 bp, Homo sapiens
tttcctttctctctcctcccgccgcccaagatgccgaaaggaaagaaggccaagggaaagaaggtggctccggccccagctgtcgtgaagaagcaggaggctaagaaagtggtgaatcccctgtttgagaaaaggcctaagaattttggcattggacaggacatccagcccaaaagagacctcacccgctttgtgaaatggccccgctatatcaggttgcagcggcagagagccatcctctataagcggctgaaagtgcctcctgcgattaaccagttcacccaggccctggaccgccaaacagctactcagctgcttaagctggcccacaagtacagaccagagacaaagcaagagaagaagcagagactgttggcccgggccgagaagaaggctgctggcaaaggggacgtcccaacgaagagaccacctgtccttcgagcaggagttaacaccgtcaccaccttggtggagaacaagaaagctcagctggtggtgattgcacacgacgtggatcccatcgagctggttgtcttcttgcctgccctgtgtcgtaaaatgggggtcccttactgcattatcaagggaaaggcaagactgggacgtctagtccacaggaagacctgcaccactgtcgccttcacacaggtgaactcggaagacaaaggcgctttggctaagctggtggaagctatcaggaccaattacaatgacagatacgatgagatccgccgtcactggggtggcaatgtcctgggtcctaagtctgtggctcgtatcgccaagctcgaaaaggcaaaggctaaagaacttgccactaaactgggttaaatgtacactgttgagttttctgtacataaaaataattgaaataatacaaattttccttc

SEQ ID NO: 655 - DNA, 876 bp, Homo sapiens
agataaggccgctcgctgacgccgtgtttcctctttcggccgcgctggtgaacaggacccgtcgccatgggccgtgtgatccgtggacagaggaagggcgccgggtctgtgttccgcgcgcacgtgaagcaccgtaaaggcgctgcgcgcctgcgcgccgtggatttcgctgagcggcacggctacatcaagggcatcgtcaaggacatcatccacgacccgggccgcggcgcgcccctcgccaaggtggtcttccgggatccgtatcggtttaagaagcggacggagctgttcattgccgccgagggcattcacacgggccagtttgtgtattgcggcaagaaggcccagctcaacattggcaatgtgctccctgtgggcaccatgcctgagggtacaatcgtgtgctgcctggaggagaagcctggagaccgtggcaagctggcccgggcatcagggaactatgccaccgttatctcccacaaccctgagaccaagaagacccgtgtgaagctgccctccggctccaagaaggttatctcctcagccaacagagctgtggttggtgtggtggctggaggtggccgaattgacaaacccatcttgaaggctggccgggcgtaccacaaatataaggcaaagaggaactgctggccacgagtacggggtgtggccatgaatcctgtggagcatccttttggaggtggcaaccaccagcacatcggcaagccctccaccatccgcagagatgcccctgctggccgcaaagtgggtctcattgctgcccgccggactggacgtctccggggaaccaagactgtgcaggagaaagagaactagtgctgagggcctcaataaagtttgtgtttatgccaa

SEQ ID NO: 656 - DNA, 750 bp, Homo sapiens
acgcgatacaagtacgtaatgacgacagacgttctttctttgctgcgtctactgcgagaatgaagactattctcagcaatcagactgtcgacattccagaaaatgtcgacattactctgaagggacgcacagttatcgtgaagggccccagaggaaccctgcggagggacttcaatcacatcaatgtagaactcagccttcttggaaagaaaaaaaagaggctccgggttgacaaatggtggggtaacagaaaggaactggctaccgttcggactatttgtagtcatgtacagaacatgatcaagggtgttacactgggcttccgttacaagatgaggtctgtgtatgctcacttccccatcaacgttgttatccaggagaatgggtctcttgttgaaatccgaaatttcttgggtgaaaaatatatccgcagggttcggatgagaccaggtgttgcttgttcagtatctcaagcccagaaagatgaattaatccttgaaggaaatgacattgagcttgtttcaaattcagcggctttgattcagcaagccacaacagttaaaaacaaggatatcaggaaatttttggatggtatctatgtctctgaaaaaggaactgttcagcaggctgatgaataagatctaagagttacctggctacagaaagaagatgccagatgacacttaagacctacttgtgatatttaaatgatgcaataaaagacctattgatttggaccttcttcttaaa

SEQ ID NO: 657 - DNA, 2320 bp, Homo sapiens
gggctacgcccgggcgcaagcgccaagagcggctgcgtctatggtcatgacgtctgacagagcgtccacccgtcttcgacaggactctatggttcttacgcgcgcagacagaccgcctatataagccatgcgcaggcggaggagcgcctctttcccttcggtgtgccactgaagatcctggtgtcgccatgggccgccgccccgcccgttgttaccggtattgtaagaacaagccgtacccaaagtctcgcttctgccgaggtgtccctgatgccaagattcgcatttttgacctggggcggaaaaaggcaaaagtggatgagtttccgctttgtggccacatggtgtcagatgaatatgagcagctgtcctctgaagccctggaggctgcccgaatttgtgccaataagtacatggtaaaaagttgtggcaaagatggcttccatatccgggtgcggctccaccccttccacgtcatccgcatcaacaagatgttgtcctgtgctggggctgacaggctccaaacaggcatgcgaggtgcctttggaaagccccagggcactgtggccagggttcacattggccaagttatcatgtccatccgcaccaagctgcagaacaaggagcatgtgattgaggccctgcgcagggccaagttcaagtttcctggccgccagaagatccacatctcaaagaagtggggcttcaccaagttcaatgctgatgaatttgaagacatggtggctgaaaagcggctcatcccagatggctgtggggtcaagtacatccccaatcgtggccctctggacaagtggcgggccctgcactcatgagggcttccaatgtgctgcccccctcttaatactcaccaataaattctacttcctgtccacctatgtctttgtatctacattcttgacggggaaggaacttcctctgggaacctttgggtcattgccctttcacttcagaaacaggttgacaactcagccctgctcatgaggcagcaaaccctgcaaagggctgggactggtggccttatgtcagttgtctactctggagcttgacttggacctccccaggtcctaggcagtaggttgaaaaacactgaagtgcttttcatgaagcacagctgcagcaaagccttgcaatcccaggctggggtcagcctacagttgtgttgcttattacaacacatgcggaccaagaggggcttgtgggctagaggctgaccagcagcgtttatttagcaagggtaggtgtgcatcacattgggcttgttctcacccatctggtttggccattcctccttggtgggaatcatccaggtactgctgaggtcacctgcgatttgccccatttcctatctctagcaacctcctgggccccatgcccccaccccttctagaacctgcattcccagggccttcaccacctgaccaaaggtctaggctaacctttggtcatttgtaacaagacctcggaacagacacgtgtgtggcatggtttggcctggggatcttagatgtctgacctgaactattgtagaacagcgctggcttttgggggagcagcaaaaatgagaggagtgctaggtgggtggcctgagcatctgtatccagggacaggactccaaaggcttttggtcccagagctggggtatgttggccccagcccccagcctgtggctcccaaaaggcctctggttttttgtaatctcagtttacagccatttcttaggtttttaattacctttattttattttgccaaacatacctgggaataccttttattttttttttaccttggggtgatggttccaaaccataaatgtgattatagttaacacatgacccttctagcgtcccagccagtgtttttcctgacctctgttctttggagaggaggatggaagggaggggtccggcacgctgctggcattttgctgtgtcctgcagcccctttccgggacacctgggttcacacagctttttagcttacataactggtgcagattttctgtgtggagatgttgccttgaccagccttggctggactttaccaggcatgcagaagcctgtaccaacacagactacagcacccaggaggtgcgagtgtggctgctcagcggttataacaggcctgactgcattgttcaccggattataatgagccaaaatgtttcccggtgtttgctggtttcagggaaggagtttgatatagcagattaaccaccctccttgtagctattggggcttaatggtttcctggtgattcttaccaatccacaataaacatggcccattggcatatctgcaa

SEQ ID NO: 658 - DNA, 719 bp, Homo sapiens
agtctcttttccggttagcgcggcgtgagaagccatgagcagcaaagtctctcgcgacaccctgtacgaggcggtgcgggaagtcctgcacgggaaccagcgcaagcgccgcaagttcctggagacggtggagttgcagatcagcttgaagaactatgatccccagaaggacaagcgcttctcgggcaccgtcaggcttaagtccactccccgccctaagttctctgtgtgtgtcctgggggaccagcagcactgtgacgaggctaaggccgtggatatcccccacatggacatcgaggcgctgaaaaaactcaacaagaataaaaaactggtcaagaagctggccaagaagtatgatgcgtttttggcctcagagtctctgatcaagcagattccacgaatcctcggcccaggtttaaataaggcaggaaagttcccttccctgctcacacacaacgaaaacatggtggccaaagtggatgaggtgaagtccacaatcaagttccaaatgaagaaggtgttatgtctggctgtagctgttggtcacgtgaagatgacagacgatgagcttgtgtataacattcacctggctgtcaacttcttggtgtcattgctcaagaaaaactggcagaatgtccgggccttatatatcaagagcaccatgggcaagccccagcgcctatattaaggcacatttgaataaattctattaccagttc

SEQ ID NO: 659 - DNA, 637 bp, Homo sapiens
aaggccctcggccggaagctccgctttctcttcctgctctccatcatggcgcaggatcaaggtgaaaaggagaaccccatgcgggaacttcgcatccgcaaactctgtctcaacatctgtgttggggagagtggagacagactgacgcgagcagccaaggtgttggagcagctcacagggcagacccctgtgttttccaaagctagatacactgtcagatcctttggcatccggagaaatgaaaagattgctgtccactgcacagttcgaggggccaaggcagaagaaatcttggagaagggtctaaaggtgcgggagtatgagttaagaaaaaacaacttctcagatactggaaactttggttttgggatccaggaacacatcgatctgggtatcaaatatgacccaagcattggtatctacggcctggacttctatgtggtgctgggtaggccaggtttcagcatcgcagacaagaagcgcaggacaggctgcattggggccaaacacagaatcagcaaagaggaggccatgcgctggttccagcagaagtatgatgggatcatccttcctggcaaataaattcccgtttctatccaaaagagcaataaaaagttttcagtgaaatgtgcaaaaa

SEQ ID NO: 660 - DNA, 660 bp, Homo sapiens
atctggcttgtccgcgcgatttccggcctctcggctttcggctcggaggaggccaaggtgcaacttccttcggtcgtcccgaatccgggttcatccgacaccagccgcctccaccatgccgccgaagttcgaccccaacgagatcaaagtcgtatacctgaggtgcaccggaggtgaagtcggtgccacttctgccctggcccccaagatcggccccctgggtctgtctccaaaaaaagttggtgatgacattgccaaggcaacgggtgactggaagggcctgaggattacagtgaaactgaccattcagaacagacaggcccagattgaggtggtgccttctgcctctgccctgatcatcaaagccctcaaggaaccaccaagagacagaaagaaacagaaaaacattaaacacagtgggaatatcacttttgatgagattgtcaacattgctcgacagatgcggcaccgatccttagccagagaactctctggaaccattaaagagatcctggggactgcccagtcagtgggctgtaatgttgatggccgccatcctcatgacatcatcgatgacatcaacagtggtgctgtggaatgcccagccagttaagcacaaaggaaaacatttcaataaaggatcatttgacaactggtgga

SEQ ID NO: 661 - DNA, 4672 bp, Homo sapiens
aggtgagggagactgggtcctggcctttgggcatcatccagcgccatcggcctggcgcttcagccaacgcgggagtggatgggccccttcttcttcgcagacagcgttcggccgctgcccgggctctaggcgcggccggacggcccagtctggagggttcggggcggaggcccgggggggtgcgcgcgcccggggtccggcctctcactcgctcccctctcgtccgcagccgcagggccgtaggcagccatggcgcccagccggaatggcatggtcttgaagccccacttccacaaggactggcagcggcgcgtggccacgtggttcaaccagccggcccgtaagatccgcagacgtaaggcccggcaagccaaggcgcgccgcatcgccccgcgccccgcgtcgggtcccatccggcccatcgtgcgctgccccacggttcggtaccacacgaaggtgcgcgccggccgcggcttcagcctggaggagctcagggtggccggcattcacaagaaggtggcccggaccatcggcatttctgtggatccgaggaggcggaacaagtccacggagtccctgcaggccaacgtgcagcggctgaaggagtaccgctccaaactcatcctcttccccaggaagccctcggcccccaagaagggagacagttctgctgaagaactgaaactggccacccagctgaccggaccggtcatgcccgtccggaacgtctataagaaggagaaagctcgagtcatcactgaggaagagaagaatttcaaagccttcgctagtctccgtatggcccgtgccaacgcccggctcttcggcatacgggcaaaaagagccaaggaagccgcagaacaggatgttgaaaagaaaaaataaagccctcctggggacttggaatcagtcggcagtcatgctgggtctccacgtggtgtgtttcgtgggaacaactgggcctgggatggggcttcactgctgtgacttcctcctgccaggggatttggggctttcttgaaagacagtccaagccctggataatgctttactttctgtgttgaagcactgttggttgtttggttagtgactgatgtaaaacggttttcttgtggggaggttacagaggctgacttcagagtggacttgtgttttttctttttaaagaggcaaggttgggctggtgctcacagctgtaatcccagcactttgaggttggctgggagttcaagaccagcctggccaacatgtcagaactactaaaaataaagaaatcagccatgcttggtgctgcacacttgtagttgcagctcctgggaggcagaggtgagggatcacttaacccaggaggcagaggctgcactgagccaggatcacgccactgcactctagcctgggcaacagtgagactgtctcaaaaaaaaaaaaagagacagggtcttcggcacccaggctggagtacagtgccacaatcatggctcactgcagtcttgaactcatggcctcaagcagtcctccctcagcctcccaagtagaggggtttataggcacgagaccctgcacccaacctagagttgccttttttaagcaaagcagtttctagttaatgtagcatcttggactttggggcgtcattcttaagcttgttgtgcccggtaaccatggtcctcttgctctgattaacccttccttcaatgggcttcttcacccagacaccaaggtatgagatggccctgccaagtgtcggcctctcctgttaaacaaaaacattctaaagccattgttcttgcttcatggacaagaggcagccagagagagtgccagggtgccctggtctgagctggcatccccatgtcttctgtgtccgagggcagcatggtttctcgtgcagtgctcagacacagcctgccctagtcctaccagctcacagcagcacctgctctccttggcagctatggccatgacaaccccagagaagcagcttcagggaccgagtcagattctgttttgtctacatgcctctgccgggtgccggtattgaggcacccagggagctgttactggcgtggaaataggtgatgctgctacctctgctgctgcactcacagccacacttgatacacgatgacaccttgcttgtttggaaacatctaaacatctagtagatgacttgcaggctgttggctaccagtttcctgtctgaggtgtatatgttaacttcgtgatcagtttgtatgtttgggactcttgtcctatgtaaagttaaggtgggccgggtgcagtggctcacgcctgtaatcctaacactgggaggccgaggcgggtggatcacctgatggtgaaacctcatctctactgaaaatacaaaaattagctgagtggtgacacacgcctgtaatcccagctacttggtaggcttgaacccaggaggcagagattgcagtgagccgagctgcaccactgtgctccagcctgggtgacagcgagactcagtctcaaaaaaagttgtacaaggtggatggttggaagcttgagcctaggctcgaatccctctcacgtgagagggcctgaagatttctggtggattccaacctggctgaagactggccgtggggggtgcaggggtctccagcgctctgccctccagcctgcttcctccctgcccacaccgcactaggggaagggcctttcctgctgcctgcggggccgcacctggagtaggtaatgccatgtggtgacgtgaatggagcagaggtctgtgccccatcacaccgccttgctgtttttactgtgggacaaaagcactctgatctgcgtgttccgggggccctcctaccagccgacttgacgggaagtcagggttcaggtatcatctgtgcacctggggcggggtagtctgcactgaacctgccagagtcccctcctcatttcactgaaagtcacagtctccagggctgtgttgctaaccttacgttctctccgtttgcttaatctattaagagccctaacaggagaggatgggctttctctgttgtctggggccctgctgttggccggtgctcttagcaagaggtcatttttctaggttgcgctgggacattgtgagtttggtgagggtcatggatgtgggctgggctgggctgggctgggccgggctgcctgctgcctgctgctcccctacctgaaatgcagctagtgcggctctgcccttcctggggctgaggaaggcttctgcaggatagctggggggctgggcaggtgggtgaggcagcctccctgctgacactcagtccttgtagctggagcaagatctcctgatccaggtacgggcctgtctgctccaagaaagactctgccaccagatgcaaaggggccctttgttttaacttagtccctggggaccgcctgattcagcacctgtcggcccaggataccccgctggtggggacaagtgcctgagtgtgggccgtgcccgagtgtggccatccctgagtggggccgtcctgactaggaagtggcttttcagttgtgatgtgtgggcctgacctagggggcgctgtggaacccgggctggaaccagccctctgtgccaggccgcagacaggttccgccggccctgaggggcagctgccatggcgtgggtcactgggagctgagaggaagggcccccaccgcacctcaggcaaagcggctctgggaacaccttgatttcgtccatgtgagccgtcccagggagggcagccaagctgtgaagcctgagaaactgacctgtgtgccacgagcttgtggtctgctgcccggtggaggaagtgcaggtgcgcccaggctcctcattccgttttgcaggattccttcggggtgtgagcatttcctattcagcctgtcgcccccggggagcacgggctggctctgtggtgcccgtggccttttgtagaagcgttggttttacggcaggttcatctctggggcagcctcccacagtgggtggggctttgccagcagtgcccacgggggtcatggggccaggcgcgctccggcgcctgcagaactgatcggggatagtctcaggaggcgctagtcacgtgccccggtgatcggggatagtctcagaaggcgctagtctcctgccccggtgatcggggatagtctcaggaggcacgagtcgcctgcctcggtgatgcaccgtttctcacaccggctgctctggcccgagctaaaggggaagacgtgtgcggataggagctgcacacaattttcctccatgtattgtttattttgctttttcttttggctagacattaggaatttcagttttcccaagttgtatttttccttttctattttaaaattatcatgcagggctgggtgaggtcgctcacgcctatagtctcaaaactttgggaggctgaggggggaggatggcatgagcccaggagtttaaggctgcagtgagccgagatcgctccactgtcctccagcctgcatgacagagcgagaccctatctcaggaaaaaaaaaaacaaaactattatgcagtagtttcgaccctggaagacgagtgtgcatctttgagttgtaacacgtgtacctcgcccatccaggcgtagtttcatttggaatctggttatcctgtagttgctttgttaaaaatatatgtaattgcaaatcattt

SEQ ID NO: 662 - DNA, 1180 bp, Homo sapiens
cacttctgccgcccctgtttcaagggataagaaaccctgcgacaaaacctcctccttttccaagcggctgccgaagatggcggaggtgcaggtcctggtgcttgatggtcgaggccatctcctgggccgcctggcggccatcgtggctaaacaggtactgctgggccggaaggtggtggtcgtacgctgtgaaggcatcaacatttctggcaatttctacagaaacaagttgaagtacctggctttcctccgcaagcggatgaacaccaacccttcccgaggcccctaccacttccgggcccccagccgcatcttctggcggaccgtgcgaggtatgctgccccacaaaaccaagcgaggccaggccgctctggaccgtctcaaggtgtttgacggcatcccaccgccctacgacaagaaaaagcggatggtggttcctgctgccctcaaggtcgtgcgtctgaagcctacaagaaagtttgcctatctggggcgcctggctcacgaggttggctggaagtaccaggcagtgacagccaccctggaggagaagaggaaagagaaagccaagatccactaccggaagaagaaacagctcatgaggctacggaaacaggccgagaagaacgtggagaagaaaattgacaaatacacagaggtcctcaagacccacggactcctggtctgagcccaataaagactgttaattcctcatgcgttgcctgcccttcctccattgttgccctggaatgtacgggacccaggggcagcagcagtccaggtgccacaggcagccctgggacataggaagctgggagcaaggaaagggtcttagtcactgcctcccgaagttgcttgaaagcactcggagaattgtgcaggtgtcatttatctatgaccaataggaagagcaaccagttactatgagtgaaagggagccagaagactgattggagggccctatcttgtgagtggggcatctgttggactttccacctggtcatatactctgcagctgttagaatgtgcaagcacttggggacagcatgagcttgctgttgtacacagggtatttctagaagcagaaatagactgggaagatgcacaaccaaggggttacaggcatcgcccatgctcctcacctgtattttgtaatcagaaataaattgcttttaaagaa

SEQ ID NO: 663 - DNA, 860 bp, Homo sapiens
ggcggtgcgttcttctacacatgcgcagggttgggcgggtcttcttccttctcgcctaacgccgccaacatggtgttcaggcgcttcgtggaggttggccgggtggcctatgtctcctttggacctcatgccggaaaattggtcgcgattgtagatgttattgatcagaacagggctttggtcgatggaccttgcactcaagtgaggagacaggccatgcctttcaagtgcatgcagctcactgatttcatcctcaagtttccgcacagtgcccaccagaagtatgtccgacaagcctggcagaaggcagacatcaatacaaaatgggcagccacacgatgggccaagaagattgaagccagagaaaggaaagccaagatgacagattttgatcgttttaaagttatgaaggcaaagaaaatgaggaacagaataatcaagaatgaagttaagaagcttcaaaaggcagctctcctgaaagcttctcccaaaaaagcacctggtactaagggtactgctgctgctgctgctgctgctgctgctgctaaagttccagcaaaaaagatcaccgccgcgagtaaaaaggctccagcccagaaggttcctgcccagaaagccacaggccagaaagcagcgcctgctccaaaagctcagaagggtcaaaaagctccagcccagaaagcacctgctccaaaggcatctggcaagaaagcataagtggcaatcataaaaagtaataaaggttctttttgacctgttgacaaatgtatttaagcctttggatttaaagcctgttgaggctggagttaggaggcagattgatagtaggattataataaacattaaataatcagttcaaa

SEQ ID NO: 664 - DNA, 2350 bp, Homo sapiens
aaagacagcggctccaccgcggtacgcggccaccggctttggagcctggaccccaacttgcctcctctcgcggagagacagtcgccgacgctcgcttagccgccgagacctcgccgccaactctctcacctctcgagacgcccaggccgctcaggctcgaatcttgcggagcagggggcgggacaatagcggccgcggcgccccactcggcagaactccgccaccaggcgcgatgccggaactacatgtcccatgacgctctgggaggccgcagctttccaccggaaagagggtggctgaggtgggggaggagcccaaaaggcattgtgggagtacagctctttcctttccgtctggcggcagccatcaggtaagccaagatgggtgcatacaagtacatccaggagctatggagaaagaagcagtctgatgtcatgcgctttcttctgagggtccgctgctggcagtaccgccagctctctgctctccacagggctccccgccccacccggcctgataaagcgcgccgactgggctacaaggccaagcaaggttacgttatatataggattcgtgttcgccgtggtggccgaaaacgcccagttcctaagggtgcaacttacggcaagcctgtccatcatggtgttaaccagctaaagtttgctcgaagccttcagtccgttgcagaggagcgagctggacgccactgtggggctctgagagtcctgaattcttactgggttggtgaagattccacatacaaattttttgaggttatcctcattgatccattccataaagctatcagaagaaatcctgacacccagtggatcaccaaaccagtccacaagcacagggagatgcgtgggctgacatctgcaggccgaaagagccgtggccttggaaagggccacaagttccaccacactattggtggctctcgccgggcagcttggagaaggcgcaatactctccagctccaccgttaccgctaatataagtaaagtttgtaaaattcatacttaataaacaatttaggacagtcatgtctgcttacaggtgttatttgtctgttaaaactagtctgcagatgtttcttgaatgctttgtcaaattaagaaagttaaagtgcaataatgtttgaagacaataagtggtggtgtatcttgtttctaataagataaacttttttgtctttgctttatcttattagggagttgtatgtcagtgtataaaacatactgtgtggtataacaggcttaataaattctttaaaaggagagaactgaaactagccctgtagatttgtctggtgcatgtgatgaaacctgcagctttatcggagtgatggcaatgctctgctggtttattttcaagtggctgcgttttttttagtttggcaggtgtagactttttaagttgggctttagaaaatctgggttagcctgaagaaaattgcctcagcctccacagtaccattttaaattcacataaaaggtgaaagctcctggttcagtgccatggcttcatggcattcagtgattagtggtaatggtaaacactggtgtgttttgaagttgaatgtgcgataaaattattagccttaagattggtaagctagcaatgaatgctagggtgggaagctggtgagccagtggccattagataaatacctttcaagtgtgagcttagacgtcaaccctaaaatacttaaccgtaatgctaattgtgatcattatgaatcccttcagtcacattagggggaaagtagttggctataagtacgtcattcttagtccagtcagtcttaaaaacatcttgggttacccactctgtccactcccataggctacagaaaaagtcacaagcgcatggtttccaaccatatgtgttttctgcagttatttctcttgttctggccaaacaaccctaaaaatccttaccattccacaaagttggaccatcacttgtgcacccactttgactatgagtataccaccacattgcatttctgtttgcaccatgtcttccaggagactagactactgttgtccagggtcaatttgagtgtaaagaaaatgtagacaaggaattgcccaattttaaattctgactttgctgacttaatttaaatgctcgttctgaaccaattttctcctatcttctctaggggtttcaaaagactcagttaattgatttccaggaagtactcatagcaagttcataaaagttcttgagacctaaatttcttcacaaaaaaagaaaagatcttaagtcatacattttaattgtgtagaggttgttcaactgaaggaataaatgtctattaaactaaaacaaatggaccttc

SEQ ID NO: 665 - DNA, 960 bp, Homo sapiens
cctgcctcctcagatctcgtttcttcggctacgaatctcgcgagaagtcaagttctcatgagttctcccaaaatccaccgctcttcctctttccctaagcagcctgagggttgactggattggtgaggcccgtgtggctacttctgtggaagcagtgctgtagttactggaagataaaagggaaagcaagcccttggtgggggaaagtatggctgcgatgatggcatttcttaggacacctttggattaataatgaaaacaactactctctgagcagctgttcgaatcatctgatatttatactgaatgagttactgtaagtacgtattgacagaattacactgtactttcctctaggtgatctgtgaaaatggttcgctattcacttgacccggagaaccccacgaaatcatgcaaatcaagaggttccaatcttcgtgttcactttaagaacactcgtgaaactgctcaggccatcaagggtatgcatatacgaaaagccacgaagtatctgaaagatgtcactttacagaaacagtgtgtaccattccgacgttacaatggtggagttggcaggtgtgcgcaggccaagcaatggggctggacacaaggtcggtggcccaaaaagagtgctgaatttttgctgcacatgcttaaaaacgcagagagtaatgctgaacttaagggtttagatgtagattctctggtcattgagcatatccaagtgaacaaagcacctaagatgcgccgccggacctacagagctcatggtcggattaacccatacatgagctctccctgccacattgagatgatccttacggaaaaggaacagattgttcctaaaccagaagaggaggttgcccagaagaaaaagatatcccagaagaaactgaagaaacaaaaacttatggcacgggagtaaattcagcattaaaataaatgtaattaaaaggaaaa

SEQ ID NO: 666 - DNA, 890 bp, Homo sapiens
gaaagctatcgagaacacggcctgggtagggccagagaggcccccgacgtgctggcccttccctcttggacgttgcgcttgttcctgcgctctatgctctctgccgttatcgcccggctagtcagtcgtccaactcaccacagagaagtccggatcgtggtagagcgccgcgtcgcacccatgtgacgtcacggcggcgccactcgcttgaggctttccccgcccaccccagcccgttctctctttccggacctggccgagcaggaggcgccatcatgggagtggacatccgccataacaaggaccgaaaggttcggcgcaaggagcccaagagccaggatatctacctgaggctgttggtcaagttatacaggtttctggccagaagaaccaactccacattcaaccaggttgtgttgaagaggttgtttatgagtcgcaccaaccggccgcctctgtccctttcccggatgatccggaagatgaagcttcctggccgggaaaacaagacggccgtggttgtggggaccataactgatgatgtgcgggttcaggaggtacccaaactgaaggtatgtgcactgcgcgtgaccagccgggcccgcagccgcatcctcagggcagggggcaagatcctcactttcgaccagctggccctggactcccctaagggctgtggcactgtcctgctctccggtcctcgcaagggccgagaggtgtaccggcatttcggcaaggccccaggaaccccgcacagccacaccaaaccctacgtccgctccaagggccggaagttcgagcgtgccagaggccgacgggccagccgaggctacaaaaactaaccctggatcctactctcttattaaaaagatttttgctgacagtgcaaa

SEQ ID NO: 667 - DNA, 734 bp, Homo sapiens
gcagataatgggaggagccgggcccgagcgagctctttcctttcgctgctgcggccgcagccatgagtatgctcaggcttcagaagaggctcgcctctagtgtcctccgctgtggcaagaagaaggtctggttagaccccaatgagaccaatgaaatcgccaatgccaactcccgtcagcagatccggaagctcatcaaagatgggctgatcatccgcaagcctgtgacggtccattcccgggctcgatgccggaaaaacaccttggcccgccggaagggcaggcacatgggcataggtaagcggaagggtacagccaatgcccgaatgccagagaaggtcacatggatgaggagaatgaggattttgcgccggctgctcagaagataccgtgaatctaagaagatcgatcgccacatgtatcacagcctgtacctgaaggtgaaggggaatgtgttcaaaaacaagcggattctcatggaacacatccacaagctgaaggcagacaaggcccgcaagaagctcctggctgaccaggctgaggcccgcaggtctaagaccaaggaagcacgcaagcgccgtgaagagcgcctccaggccaagaaggaggagatcatcaagactttatccaaggaggaagagaccaagaaataaaacctcccactttgtctgtacatactggcctctgtgattacatagatcagccattaaaataaaacaagccttaatctgcaa

SEQ ID NO: 668 - DNA, 740 bp, Homo sapiens
cggaagcgctcgtgaccaccatttccgacccgggcaagatggcagcggcgctgcgcgtgcgttgttgagtgttcgggacgccggcctgcaggcgccatggtcttcctcaccgcgcagctctggctgcggaatcgcgtcaccgaccgctactttcggatccaggaggtgctgaagcacgccaggcacttccggggaaggaaaaatcgctgctacaggttggcggtcagaaccgtgattcgagcctttgtgaaatgcaccaaagcccgatacctgaagaaaaagaacatgaggaccctctggattaatcgaattacagctgctagccaggaacatggactgaagtatccagcgctcattgggaatttagttaagtgccaggtggagctcaacaggaaagtcctagcggatctggccatctacgagccaaagactttcaaatctttggctgccttggccagtaggaggcgacacgaaggatttgctgctgccttgggggatgggaaggaacctgaaggcattttttccagagtggtgcagtaccactgaggactgttgctgtattgattaggaaaagagacagagtaatttgcagtttgtttgatttatacttttgtttatctacaacccaataacagacatgagggatggccctgtctctctgggacagagcctcacagatgatgtccatgttttgtgtgaatgaaactcaaacactcttcagtttttagagtcaaaaaaaa

SEQ ID NO: 669 - DNA, 570 bp, Homo sapiens
tttcctttcggccggaaccgccatcttccagtaattcgccaaaatgacgaacacaaagggaaagaggagaggcacccgatatatgttctctaggccttttagaaaacatggagttgttcctttggccacatatatgcgaatctataagaaaggtgatattgtagacatcaagggaatgggtactgttcaaaaaggaatgccccacaagtgttaccatggcaaaactggaagagtctacaatgttacccagcatgctgttggcattgttgtaaacaaacaagttaagggcaagattcttgccaagagaattaatgtgcgtattgagcacattaagcactctaagagccgagatagcttcctgaaacgtgtgaaggaaaatgatcagaaaaagaaagaagccaaagagaaaggtacctgggttcaactaaagcgccagcctgctccacccagagaagcacactttgtgagaaccaatgggaaggagcctgagctgctggaacctattccctatgaattcatggcataataggtgttaaaaaaaaaaataaaggacctctgggctacaaaaaa

SEQ ID NO: 670 - DNA, 2090 bp, Homo sapiens
gcgtctgcgtagttcgctcacctccctttctaactccgctgccgccatggctcctgtgaaaaagcttgtggtgaaggggggcaaaaaaaagaagcaagttctgaagttcactcttgattgcacccaccctgtagaagatggaatcatggatgctgccaattttgagcagtttttgcaagaaaggatcaaagtgaacggaaaagctgggaaccttggtggaggggtggtgaccatcgaaaggagcaagagcaagatcaccgtgacatccgaggtgcctttctccaaaaggtatttgaaatatctcaccaaaaaatatttgaagaagaataatctacgtgactggttgcgcgtagttgctaacagcaaagagagttacgaattacgttacttccagattaaccaggacgaagaagaggaggaagacgaggattaaatttcatttatctggaaaattttgtatgagttcttgaataaaacttgggaaccaaaatggtggtttatccttgtatctctgcagtgtggattgaacagaaaattggaaatcatagtcaaagggcttcccttggttcgccactcatttatttgtaacttgacttctttttttttctgcttaaaaatttcaattctcgtggtaataccagagtagaaggagagggtgactttaccgaactgacagccattggggaggcagatgcgggtgtggaggtgtgggctgaaggtagtgactgtttgattttaaaaagtgtgactgtcagttgtatctgttgcttttctcaatgattcagggatacaaatgggcttctctcattcattaaaagaaaacgcgacatctttctaagattctctgtgggaaaatgactgtcaataaaatgcgggtttctgggccattcgtcttactttcattttttgattacaaatttctcttgacgcacacaattatgtctgctaatcctcttcttcctagagagagaaactgtgctccttcagtgttgctgccataaaggggtttggggaatcgattgtaaaagtcccaggttctaaattaactaaatgtgtacagaaatgaacgtgtaagtaatgtttctacaggtctttgcaacaaactgtcactttcgtctccagcagagggagctgtaggaatagtgcttccagatgtggtctcccgtgtggggcccagcaatgggggcccctgatgccaagagctctggaggttcttgaaagaggggacacgaaggaggagtgactgggaagcctcccatgccaaggaggtgggaggtgccctggaaatagctgcctcatgccacttaggccatgactggatttaatgtcagtggtgtgccacagtgcagaggctagacaactgaaaggggctaccaaggctgggaaaaaaatgcaattgttgctgtgagtgactttgaaagactctggtgccttgtggtgcccttctgaaattcaaacagtaatgcaaaagtgtctgcattagaatttacggtgtctaaaattcatgtttttaaaagagcttgcctacagatggtttccacacttgaaattgtgccctgcgagttgcatagctggaagttcaatgctcagtcctaccttggctcccattaaacatttggtgctctgtggattgagttgaacgtgttgaggctttgcaatttcacttgtgttaaaggctctggcatttttccatttctatgcaaatttctttgaagcagaattgcttgcatatttcttctctgccgtcacagaaagcagagtttctttcaaacttcactgaggcatcagttgctctttggcaatgtcccttaaccatgattattaactaagtttgtggcttgagtttacaaattctacttgttgcattgatgttcccatgtagtaagtcatttttagtttggttgtgaaaaaaccctgggctgaagttggcatttcagttaaaagaaaaaaagaaactagtcccagatttgaaaacttgtaataaaattgaaactcactggttttctatgtctttttgaactcttgtaatcgagttttgatcatattttctattaaagtggctaacacctggctactcttactgtaaaaaa

SEQ ID NO: 671 - DNA, 580 bp, Homo sapiens
ggccacgtgaggagggtgggcggggcgttaaagttcatatcccagtgtcctttgaatcgacttccttttttcttttttccggcgttcaagatgtcgaagcgaggacgtggtgggtcctctggtgcgaaattccggatttccttgggtcttccggtaggagctgtaatcaattgtgctgacaacacaggagccaaaaacctgtatatcatctccgtgaaggggatcaagggacggctgaacagacttcccgctgctggtgtgggtgacatggtgatggccacagtcaagaaaggcaaaccagagctcagaaaaaaggtacatccagcagtggtcattcgacaacgaaagtcataccgtagaaaagatggcgtgtttctttattttgaagataatgcaggagtcatagtgaacaataaaggcgagatgaaaggttctgccattacaggaccagtagcaaaggagtgtgcagacttgtggccccggattgcatccaatgctggcagcattgcatgattctccagtatatttgtaaaaaataaaaaaaaaaactaaacccattaaaaagtatttgtttgcaaaa

SEQ ID NO: 672 - DNA, 970 bp, Homo sapiens
agcattggagacccttttcacaagatggcgccgaaagcgaagaaggaagctcctgcccctcctaaagctgaagccaaagcgaaggctttaaaggccaagaaggcagtgttgaaaggtgtccacagccacaaaaagaagaagatccgcacgtcacccaccttccggcggccgaagacactgcgactccggagacagcccaaatatcctcggaagagcgctcccaggagaaacaagcttgaccactatgctatcatcaagtttccgctgaccactgagtctgccatgaagaagatagaagacaacaacacacttgtgttcattgtggatgttaaagccaacaagcaccagattaaacaggctgtgaagaagctgtatgacattgatgtggccaaggtcaacaccctgattcggcctgatggagagaagaaggcatatgttcgactggctcctgattacgatgctttggatgttgccaacaaaattgggatcatctaaactgagtccagctgcctaattctgaatatatatatatatatatcttttcaccatatacatgcctgtctgtcaatttctggttgggctgggaggccacacacacacactgacatgacagggcttgggcaagactcctgttctacttatccttttgaaatacctcaccctgccactccaccatgtatgatcattccagagatctttgtgactagagttagtgtcctaggaaaaccagaactcagaacttgcctccatggttgagtaacaagctgtacaagaaccccttttatccctggaagaggctgtgtatgaaaccaatgcccagggtttgaagggtgttagcatccatttcaggggagtgtggattggctggctctctggtagcattttgtcctcacacacccatctactatgtccaaccggtctgtctgcttccctcaccccttgcccaataaaggacaaggacttcagagga

SEQ ID NO: 673 - DNA, 570 bp, Homo sapiens
tctttcttttcgccatcttttgtctttccgtggagctgtcgccatgaaggtcgagctgtgcagttttagcgggtacaagatctaccccggacacgggaggcgctacgccaggaccgacgggaaggttttccagtttcttaatgcgaaatgcgagtcggctttcctttccaagaggaatcctcggcagataaactggactgtcctctacagaaggaagcacaaaaagggacagtcggaagaaattcaaaagaaaagaacccgccgagcagtcaaattccagagggccattactggtgcatctcttgctgatataatggccaagaggaatcagaaacctgaagttagaaaggctcaacgagaacaagctatcagggctgctaaggaagcaaaaaaggctaagcaagcatctaaaaagactgcaatggctgctgctaaggcacctacaaaggcagcacctaagcaaaagattgtgaagcctgtgaaagtttcagctccccgagttggtggaaaacgctaaactggcagattagatttttaaataaagattggattataactctagaaaaaaaa

SEQ ID NO: 674 - DNA, 590 bp, Homo sapiens
ataggtctcgcgagatctttggtaaacttacagaaccggaagcagcgtgtagttctcttcccttttgcggccatcaccgaagcgggagcggccaaaatgaagtttaatccctttgtgacttccgaccgaagcaagaatcgcaaaaggcatttcaatgcaccttcccacattcgaaggaagattatgtcttcccctctttccaaagagctgagacagaagtacaacgtgcgatccatgcccatccgaaaggatgatgaagttcaggttgtacgtggacactataaaggtcagcaaattggcaaagtagtccaggtttacaggaagaaatatgttatctacattgaacgggtgcagcgggaaaaggctaatggcacaactgtccacgtaggcattcaccccagcaaggtggttatcactaggctaaaactggacaaagaccgcaaaaagatcctcgaacggaaagccaaatctcgccaagtaggaaaggaaaagggcaaatacaaggaagaaaccattgagaagatgcaggaataaagtaatcttatatacaagctttgattaaaacttgaaacaaagagcctgaaaaaaaa

SEQ ID NO: 675 - DNA, 480 bp, Homo sapiens
tccttctttcctttttgctggtagggccgggtggttgctgccgaaatgggcaagttcatgaaacctgggaaggtggtgcttgtcctggctggacgctactccggacgcaaagctgtcatcgtgaagaacattgatgatggcacctcagatcgcccctacagccatgctctggtggctggaattgaccgctacccccgcaaagtgacagctgccatgggcaagaagaagatcgccaagagatcaaagataaaatcttttgtgaaagtgtataactacaatcacctaatgcccacaaggtactctgtggatatccccttggacaaaactgtcgtcaataaggatgtcttcagagatcctgctcttaaacgcaaggcccgacgggaggccaaggtcaagtttgaagagagatacaagacaggcaagaacaagtggttcttccagaaactgcggttttagatgctttgttttgatcattaaaaa

SEQ ID NO: 676 - DNA, 4880 bp, Homo sapiens
aacgaggcccttagggtcggcttaggcggttccctgaccaaggcgccagaaaagggcctggctcaagcaagcacgggcggcgtgcagtacagcacacctagccccgattcttcaacagttctcgccctccgagcctagcacaacgagcctcaccgaaaccgtacaccgccaccaggacactccgtgatgggggatcaccaccctcagaaagaggaagcgactagcaggcgcgcaatcccgcgagaccaggaggccccgcccgaagcccggcctctgtgaccggaagtgaggcgttttgccccgcccccgtggccgatacctcgcgagacttggcgaaggccttcctttttcgtctgggctgccaacatgccatccagactgaggaagacccggaaacttaggggccacgtgagccacggccacggccgcataggcaagcaccggaagcaccccggcggccgcggtaatgctggtggtctgcatcaccaccggatcaacttcgacaaataccacccaggctactttgggaaagttggtatgaagcattaccacttaaagaggaaccagagcttctgcccaactgtcaaccttgacaaattgtggactttggtcagtgaacagacacgggtgaatgctgctaaaaacaagactggggctgctcccatcattgatgtggtgcgatcgggctactacaaagttctgggaaagggaaagctcccaaagcagcctgtcatcgtgaaggccaaattcttcagcagaagagctgaggagaagattaagagtgttgggggggcctgtgtcctggtggcttgaagccacatggagggagtttcattaaatgctaactactttttccttgtggtgtgagtgtaggttcttcagtggcacctctacatcctgtgtgcattgggagcccaggttctagtacttagggtatgaagacatggggtcctctcctgacttccctcaaatatatggtaaacgtaagaccaacacagacgttggccagttaaacatttctgtttataaagtcagaataatacctgttgatcactgaaaggcctgcatgtattgtactctgaattttacagtgaatgagagaatgtaccctaattgttcaacagggctcaaaaggaaagattccattttgatgggtcacattctaaagaggggcagtgtgataggaatgagatggtcctttaggacttaagttctcagcccaaggtttttccacgtggccccctcatcttttttttttttttaaacggagtctctcttgccaggctggagtgcagtggcacgatctcggctcactgcagcctccgcctcccaggttaagcgattctcctgcctcagcttcctgactaactgggattacaggcgcccaccaccatgcccagctaatttttgtattttcagtagagatggggtttcaccatgttggccatgctggtctctaactcctaacctcaagtgatctgcccacatcggcctccaaaagttctgggattatagtgtgagccactgcgcccggccatggctccttaatcttgatccaaattattgttacatccagaatgtgatgaatcaaaatctcgagatgggggtccagcaatctgaaatttcagtatgccagggcttttctgtatgtcaaagtgggtttgaaatagttaatttttcttctagtctgaaatgtatcgggaaaatttggaaatcctgaaggctggaaattgaaataagtttttctaggatttgtgtctcttgctattggaaaactgatggtgaccaattcatgtttacaaataagatcctcatagatctcggtaaattataatttgctacagttttatggttcttcctgtgattttgagctttttttgacccaaaataatacagtctaaaactatagacaaataagatggcacttagactcctgggttttagttagtggaggtttccttagtgcactgtggggtcataataagccgagaaccatggctgtctatgggacacatctgtcaggacaacctttagaggatgttggggatcaaatagaaggcacagagaagcactgaattggcttacataagaataggctagaattacaagtagtgaaacctcgattcagctggacaattttaaacaaatgtatcatttggcttgtatcttctgttgtgctggagaagttagaaataagggctctccagaccagcctgaccaacctggagaaaccttgtctctactaaatacacaaaattagccaggcgtggtggcacatgcctgtaatcccagctactttggaggctgagccaggagaatctccaggaggcggaggttgctgtgagccgagatcgtgccattgcactccagcttgggcaacaagagtgaaactctgtccaccccccccaaaaaaagtaagggctctccattagggcccatagaggacttgtaatatggaacctgaatccaaggatcccacaataagtggtcagtagttcatgatgaattaaaagactcaatatttggtcttcacccaatacctgtgtgacttttagtcctaatttcctcatctttaaaatttcagtgaaagtgcctacctgaggattgtgtagattaaaatggaaaccgtgcacttaattttttgttttgttttgagacggagtctcgctctgtcgcccaggctggagtgcagtggtgcgatctcagatcactgcaagctccgcctcctaggttcagaccattctcctgcctcagcttcccaagtagctgggactacaggcgcccgccactgcgcccggctaattttttgcatttttagtagagacagggtttcaccgtgttagccaggatggtctcgatctcctgatctgcccgcctcagcctcccaaagtgctgggattacaggcatgagccaccgcgcccggcccaggcacttaatttttgtgtttgacttagtaacttaagtgcaaactattacgggagcagatggagtcaattggccttcatgtgattgtcagtgggaaattggtccaagcagagggaatactggttcaggaaactggtttgggaaggttaggcaaacgggaagtgctatggtggagagaaagattactctggccgggctgtaaaggacggctacaatgggaggctgaaggcagaaccaagaaaatgggagtgagtatggaaaaggtacgattcagacggcataatggacgggacttggagactgaattgtagtgggccgaccacaaaatgataaggcatggaaggaagtagagtttggggggaaggatccctagtcccttaatggctaccttcttccccaggagttgttaggccatccgatcccctggcctgggaaagaaacactgatttcgttgctggcttgttcactcaccagaagctacagctactaacagttctaaaaactgtttcatgtgatgaggaacagacgaaaatagttttgagccctaagtccgccgattccagtgctttcttgaacccgcatttactaaaatattttcatgactgccaagctttgaatagcctgctgtgttcatggaggctcatactggcgatctctagtggctggctaaagcttgaattgcaaaagatctaatttctggtctaatgtatatatgccttaaatatagttgcgttcaaacgtgggagctgcaggtgcaacttgattttatgacaaatggctgccacataatttgcacaagcagtgctcgtcaagggcagctaaatcaggcgagctttcaatcaaaataaatgtactactaaaccctacttagcggctaactagcccaagagcagacagcccacggacggactgcaagtcggaagcgcgggcggaagctgtgcagcgcccacctggtggctccatcggccgcgttcatcagtcagcacgacccgacctcagtggcgtcctcacaacacagaccggaccttgggtcttaccccggcacctgagaaccacttccggtgagtagcttctacttccggagacgatgactcccccgcgtcccagaccggaagaagcccggcggagaccggcctcgctcggccacttccggcaagggcggagccggccagtggtgcgcgagcgcagataactcccctggagaggcgggatgttcaactccacccctggtccttgggcggccgtgggtccccttcgaagcggaggaatggccaacctcgccgcacttcgagcccctttagggtgcgtttaagaacagtgggcgtggcctttacgtaaatcttcgagatgggaacctccagaatttgtctcaattgtctaaaaggtaatgagcgtcagcgacattcaagggcactttgggctaaaaaagaaagtgcttgtacacggatggaaatattctagaagaacataaaaggaatttcctcttaggaggttagggaaatgagcacgaagtatgttttggtgcagttttttgttcaacccaatgcgtattttcatattgagaggcaatataaatggagcgaaagtatcttgagaaaaaaaaaaaaactaccagaacttgccgttgctgaaaagtaatattttctctttcgagagttttcatggccttttaaattacacccccacctccacaggcaaataaatttgttttggaatgcataccacatcatctggctctagaaacgtattttgtgtagctcccctagcaagaatataggttaaagcgtaaatttaattcctggctctattttacatcccaatttttattttcctctcattcccactttacgttgtttcaaataacctagtttgtgtatccctgtaagtcattttggtataaagtaggttataagtgtacatgcgaaaagatgtttttaacaaaaatgtaactgaa

SEQ ID NO: 677 - DNA, 4210 bp, Homo sapiens
ctctttccgtctcaggtcgccgctgcgaagggagccgccgccatgtctgcgcatctgcaatggatggtcgtgcggaactgctccagtttcctgatcaagaggaataagcagacctacagcactgagcccaataacttgaaggcccgcaattccttccgctacaacggactgattcaccgcaagactgtgggcgtggagccggcagccgacggcaaaggtgtcgtggtggtcattaagcggagatccggccagcggaagcctgccacctcctatgtgcggaccaccatcaacaagaatgctcgcgccacgctcagcagcatcagacacatgatccgcaagaacaagtaccgccccgacctgcgcatggcagccatccgcagggccagcgccatcctgcgcagccagaagcctgtgatggtgaagaggaagcggacccgccccaccaagagctcctgagccccctgcccccagagcaataaagtcagctggctttctcacctgcctcgactgggcctccctttttgaaacgctctggggagctctggccctgtgtgttgtcattcaggccatgtcatcaaaactctgcatgtcaccttgtccatctggaggtgatgtcaatggctggccatgcaggaggggtggggtagctgccttgtccctggtgagggcaagggtcactgtcttcacagaaaaagtttgctgacttgtgattgagacctactgtcccattgtgaggtggcctgaagaatcccagctggggcagtggcttccattcagaagaagaaaggccttttctagcccagaagggtgcaggctgagggctgggccctgggccctggtgctgtagcacggtttggggacttggggtgttcccaagacctgggggacgacagacatcacgggaggaagatgagatgacttttgcatccagggagtgggtgcagccacatttggaggggatgggctttacttgatgcaacctcatctctgagatgggcaacttggtgggtggtggcttataactgtaagggagatggcagccccagggtacagccagcaggcattgagcagccttagcattgtccccctactcccgtcctccaggtgtccccatccctcccctgtctctttgagctggctcttgtcacttaggtctcatctcagtggccgctcctgggccaccctgtcacccaagctttcctgattgcccagccctcttgtttcctttggcctgtttgctccctagtgtttattacagcttgtgaggccaggagtttgagaccatcctaggcaacataatgagacaccgtctctaaaataaaattagctgggtgtggtggtgcaccgcctgtggtcccagctcctcagaggttgagtagaggctgaggtgagcggagcacttgagccaagagtatgaggctgcagtgagcccatgagccccaccactacactccagcctggaagacaccatgacacacagtgaggcctggatggggaaagagtcctgctgttgatcctcacatgtttcctgggcacctaactctgtcagccactgccagggaccaaggatccagcatccatggcacccctggttcctgccatcctggggtacccgattcaaagaaggactctgctccctgtctgagaccacccccggctctgactgagagtaaggggactgtcagggcctcgacttgccattggttggggtcgtacggggctgggagccctgcgttttgaggcagaccactgcccttccgacctcagtcctgtctgctccagtcttgcccagctcgaaggagagcagatctgaccacttgccagcccctgtctgctgtgaattaccatttcctttgtccttcccttagttgggtctattagctcagattgagaggtgttgccttaaaactgagttgggtgacttggtacctgctcaggaccccccgcactgtcccaatcccactcaggcccacctccagctggcctcactccgctggtgacttcgtacctgctcaggagcccccactgtcccagtcccactcaggcccatctctggctggcctcactgcgctgggactccgccttcataaggagagctcactgctcacgttagtagatggccccttctcgtgaggcctctcccctggcacctgcttcagttgtcctccacagcactgatttgcagcccacaagctggcaggtttatctgtctcatgtttgtcttgtgctggtgggcaaggggtttgtctagcacaccagcatataatgagatgcttgatgaatggtgcatattgaatgtataaagcccaccggtcctgagagtttgctcactggagactttctggagatggagtctcgctctgttgcccaggctggcgagtgcaatggcgcgatcttggctcactgcagcctccacctcctgggttcaagcgattctcctgcctcagcctcccgagtagctgggattacaggtgggtgtcaccacacccagctcagtattgtatttttagcagagatggggtttcaccattttgcccaggctggtttggaactcctgacttcaaattacccacctgcctcagcctcccaaagtgctggcattacaggcgctcgaggctttctgatgtggctgctgctgctcagaaggccttgtccttaaccacctccttgcctgccctggaggcttgtgcctctaggccccaccccctgtggagtcctgctggctttctccatccctatctgaatcctccctgctgtgtggcctcccctggtctcatccgtaacacagcccagcttagtgggcctctgttcctgcgggtggccagcctgtctgtgtggctgggctggggaggccacgtctggtatctgaatgctatcggtgggttggggtggaggaaccaggagagggctggagggagggagatggtctcagccccacagagtttggagtcctcagtgtgctgagcaaacgtggagacaccatttccctcctctagacctcatcttggagagagagatgttggatggggccatctattccagctttattcacacaaatcatgtctgttggcctggaaattggaaaaccagttaaaccaaaaacatgatattaagaaaacaggcaggctcaccatagtaaaaatgctgaaagccaaagacaaaattgggagaacaaaagaaaagcgtcttgtcacatacagaaggtccctgataaagttagtagctgccctcatcagaaaccaggcccaggcagtggggacacatccagagtgctgaaagaacctcccccaggtcatcctatccccaagagtgatgcccggcagcattcccagctcagggctaatggttcacggaagccaggaatcaaactgcctgggttccagtcccagctctgccagttatgcccagctgtggggacttgggcagctcgtttagtagcaccgtgcctcagtttcccatatgtaaaaggccattttgagtgcctttcacagccctgcataaggcaggtgtctcagtgttcactgctgtctctccagctcttagtccagtagctgcatggtgagtgagcgtagggcgcaccctggaaggctgccaagcccaaagttgtgcagagcgctggggactccagactccccacagcagcagagactcgggactgaggcatcctctgttcacaggacatgctggcatctactgggtcagggctctgctgctcggtggctgtgcaaccttgggcaagttcctcaacctctctgtgtcttcgtaccctcatctgtaacatgcgtgtcgatagaccctactactcagggttgatgagaagattaaatgtgcaaaacctgcttgactgtgcccacaaatcctgattgtaggaataaattaatgactttttataaatattttgatcagatggactcatgatcacagatgtcttcacatgcctatgactaatttgtacacaaactaatgctcgtgtttcccaagcacctggaagacatgccagatccatgtgcagtaatgcctggtggctccaggtctgccccgccgtcctgtggggctgtgagctttcccagcctcctgcccgtgtttgtgaatatcattctgtcctcagctgcatttccagcccaggctgtttggcgctgcccaggaatggtatcaattcccctgtttctcttgtagccagttactagaataaaatcatctactttaaaaa

SEQ ID NO: 678 - DNA, 697 bp, Homo sapiens
ttccggcgttgttgaccctatttcccgtgctgcaccgcagcccctttctcttccggttctaggcgcttcgggagccgcggcttatggtgcagacatggccaagtccaagaaccacaccacacacaaccagtcccgaaaatggcacagaaatggtatcaagaaaccccgatcacaaagatacgaatctcttaagggggtggaccccaagttcctgaggaacatgcgctttgccaagaagcacaacaaaaagggcctaaagaagatgcaggccaacaatgccaaggccatgagtgcacgtgccgaggctatcaaggccctcgtaaagcccaaggaggttaagcccaagatcccaaagggtgtcagccgcaagctcgatcgacttgcctacattgcccaccccaagcttgggaagcgtgctcgtgcccgtattgccaaggggctcaggctgtgccggccaaaggccaaggccaaggccaaggccaaggatcaaaccaaggcccaggctgcagccccagcttcagttccagctcaggctcccaaacgtacccaggcccctacaaaggcttcagagtagatatctctgccaacatgaggacagaaggactggtgcgaccccccacccccgcccctgggctaccatctgcatggggctggggtcctcctgtgctatttgtacaaataaacctgaggcaggaaa

SEQ ID NO: 679 - DNA, 554 bp, Homo sapiens
agttccggctctgccgtgaagagctttgcattgtgggaagtctttcctttctcgttccccggccatcttagcggctgctgttggttgggggccgtcccgctcctaaggcaggaagatggtggccgcaaagaagacgaaaaagtcgctggagtcgatcaactctaggctccaactcgttatgaaaagtgggaagtacgtcctggggtacaagcagactctgaagatgatcagacaaggcaaagcgaaattggtcattctcgctaacaactgcccagctttgaggaaatctgaaatagagtactatgctatgttggctaaaactggtgtccatcactacagtggcaataatattgaactgggcacagcatgcggaaaatactacagagtgtgcacactggctatcattgatccaggtgactctgacatcattagaagcatgccagaacagactggtgaaaagtaaaccttttcacctacaaaatttcacctgcaaaccttaaacctgcaaaattttcctttaataaaatttgcttgttttaaaaacattgtatcta

SEQ ID NO: 680 - DNA, 510 bp, Homo sapiens
tggcgacccggaagttgtacttgcaactgcggctttccttctcccacaatccttcgcgctcttcctttccaacttggacgctgcagaatggctcccgcaaagaagggtggcgagaagaaaaagggccgttctgccatcaacgaagtggtaacccgagaatacaccatcaacattcacaagcgcatccatggagtgggcttcaagaagcgtgcacctcgggcactcaaagagattcggaaatttgccatgaaggagatgggaactccagatgtgcgcattgacaccaggctcaacaaagctgtctgggccaaaggaataaggaatgtgccataccgaatccgtgtgcggctgtccagaaaacgtaatgaggatgaagattcaccaaataagctatatactttggttacctatgtacctgttaccactttcaaaaatctacagacagtcaatgtggatgagaactaatcgctgatcgtcagatcaaataaagttataaaattgccttcaaaa

SEQ ID NO: 681 - DNA, 1660 bp, Homo sapiens
aggggttacgacccatcagcccttgcgcgccaccgtcccttctctcttcctcggcgctgcctacggaggtggcagccatctccttctcggcatcatggccgccctcagaccccttgtgaagcccaagatcgtcaaaaagagaaccaagaagttcatccggcaccagtcagaccgatatgtcaaaattaagcgtaactggcggaaacccagaggcattgacaacagggttcgtagaagattcaagggccagatcttgatgcccaacattggttatggaagcaacaaaaaaacaaagcacatgctgcccagtggcttccggaagttcctggtccacaacgtcaaggagctggaagtgctgctgatgtgcaacaaatcttactgtgccgagatcgctcacaatgtttcctccaagaaccgcaaagccatcgtggaaagagctgcccaactggccatcagagtcaccaaccccaatgccaggctgcgcagtgaagaaaatgagtaggcagctcatgtgcacgttttctgtttaaataaatgtaaaaactgccatctggcatcttccttccttgattttaagtcttcagcttcttggccaacttagtttgccacagagattgttcttttgcttaagcccctttggaatctcccatttggaggggatttgtaaaggacactcagtccttgaacaggggaatgtggcctcaagtgcacagactagccttagtcatctccagttgaggctgggtatgaggggtacagacttggccctcacaccaggtaggttctgagacacttgaagaagcttgtggctcccaagccacaagtagtcattcttagccttgcttttgtaaagttaggtgacaagttattccatgtgatgcttgtgagaattgagaaaatatgcatggaaatatccagatgaatttcttacacagattcttacgggatgcctaaattgcatcctgtaacttctgtccaaaaagaacaggatgatgtacaaattgctcttccaggtaatccaccacggttaactggaaaagcactttcagtctcctataaccctcccaccagctgctgcttcaggtataatgttacagcagtttgccaaggcggggacctaactggtgacaattgagcctcttgactggtactcagaatttagtgacacgtggtcctgattttttttggagacggggtcttgctctcacccaggctgggagtgcagtggcacactgactacagccttgacctccccaggctcaggtgatcttcccacctcagccttccaagtagctgggactacagatgcacacctccaaacctgggtagtttttgaagtttttttgtagaggtggtctagccatgttgcctaggctcccgaactcctgagctcaagcaatcctgcttcagcctcccaaagtactgggattacaggcatcttctgtagtatataggtcatgagggatatgggatgtggtacttatgagacagaaatgcttacaggatgtttttctgtaaccatcctggtcaacttagcagaaatgctgcgctgggtataataaagcttttctacttctagtctagacaggaatcttacagattgtctcctgttcaaaacctagtcataaatatttataatgcaaactggtcaaaaaaaaaa

SEQ ID NO: 682 - DNA, 900 bp, Homo sapiens
cttttttcttcctcttccggggacgttgtctgcaggcactcagaatggtccagcgtttgacataccgacgtaggctttcctacaatacagcctctaacaaaactaggctgtcccgaacccctggtaatagaattgtttacctttataccaagaaggttgggaaagcaccaaaatctgcatgtggtgtgtgcccaggcagacttcgaggggttcgtgctgtaagacctaaagttcttatgagattgtccaaaacaaagaaacatgtcagcagggcctatggtggttccatgtgtgctaaatgtgttcgtgacaggatcaagcgtgctttccttatcgaggagcagaaaatcgttgtgaaagtgttgaaggcacaagcacagagtcagaaagctaaataaaaaaatgaaacttttttgagtaataaaaatgaaaagacgctgtccaatagaaaaagttggtgtgctggagctacctcacctcagcttgagagagccagttgtgtgcatctctttccagttttgcatccagtgacgtctgcttggcatcttgagattgttatggtgagagtatttacacctcagcaaatgctgcaaaatcctgttttcccccagagagctggaggttaaatactaccagcacatccctagatactactcaagttacagtatatgatcactaatatagtatgctcttggtaccaggagctctgatatatatctggtacatgtttgataatgacttgattgttattataagtacttattaatacttcgattctgtaaagagtttagggtttgattttataaaatccaaaatgagccttttattgaatccagttctctatgtgaccagttctctgtatgaatggaagggaaaagaattaaaaatcttgcaaagggg

SEQ ID NO: 683 - DNA, 460 bp, Homo sapiens
cttcctctttccctcggagcgggcggcggcgttggcggcttgtgcagcaatggccaagatcaaggctcgagatcttcgcgggaagaagaaggaggagctgctgaaacagctggacgacctgaaggtggagctgtcccagctgcgcgtcgccaaagtgacaggcggtgcggcctccaagctctctaagatccgagtcgtccggaaatccattgcccgtgttctcacagttattaaccagactcagaaagaaaacctcaggaaattctacaagggcaagaagtacaagcccctggacctgcggcctaagaagacacgtgccatgcgccgccggctcaacaagcacgaggagaacctgaagaccaagaagcagcagcggaaggagcggctgtacccgctgcggaagtacgcggtcaaggcctgaggggcgcattgtcaataaagcacagctggctgagactgc

SEQ ID NO: 684 - DNA, 435 bp, Homo sapiens
gagtagatatcccggagttccgcgcggcgccagcccttccgccacggccgtctctggagagcagcagccatggccctacgctaccctatggccgtgggcctcaacaagggccacaaagtgaccaagaacgtgagcaagcccaggcacagccgacgccgcgggcgtctgaccaaacacaccaagttcgtgcgggacatgattcgggaggtgtgtggctttgccccgtacgagcggcgcgccatggagttactgaaggtctccaaggacaaacgggccctcaaatttatcaagaaaagggtggggacgcacatccgcgccaagaggaagcgggaggagctgagcaacgtactggccgccatgaggaaagctgctgccaagaaagactgagcccctcccctgccctctccctgaaataaagaacagcttgacagaaaa

SEQ ID NO: 685 - DNA, 881 bp, Homo sapiens
gagtcctctcagccgcccgagggcgctgcgctgagccttacactctatgattgctcctaccgactcccatgaggaagtgcgatcgggaacctcctatatacttccgtttgcctcgcggtttctttctttccgcgccgatagcgctcacgcaagcatggttaacgtccctaaaacccgccggactttctgtaagaagtgtggcaagcaccaaccccataaagtgacacagtacaagaagggcaaggattctctgtacgcccagggaaagcggcgttatgacaggaagcagagtggctatggtgggcaaactaagccgattttccggaaaaaggctaaaactacaaagaagattgtgctaaggcttgagtgcgttgagcccaactgcagatctaagagaatgctggctattaaaagatgcaagcattttgaactgggaggagataagaagagaaagggccaagtgatccagttctaagtgtcatcttttattatgaagacaataaaatcttgagtttatgttcacttcatttgtttgctgttcatcttttgggagggaataagctagagccatcaatacaattccgcttgtggggaaatttatgcctcttactggtactacttgttttgcattgaagctgactggttgagttcacatcatatgttgcaattttctaatttggcacttcaatcactaggggccttatgaggcagtttgtcattatgcaatggttattggttatcatgtgagtagacacatttcaggctaatagggagaagtcagtaacacattcatagtgaatatgagatgtctttgctaagagttaagtgtcagatctttgttataacagttaatttaataaagaattttggcattgttcttc

SEQ ID NO: 686 - DNA, 1574 bp, Homo sapiens
gcgccccgcaggaagtgcttccctgggcggaagcttctgagcgtgatatagcggaagtgccttctcttccggtctttctggtctcggccgcagaagcgagatgacgaagggaacgtcatcgtttggaaagcgtcgcaataagacgcacacgttgtgccgccgctgtggctctaaggcctaccaccttcagaagtcgacctgtggcaaatgtggctaccctgccaagcgcaagagaaagtataactggagtgccaaggctaaaagacgaaataccaccggaactggtcgaatgaggcacctaaaaattgtataccgcagattcaggcatggattccgtgaaggaacaacacctaaacccaagagggcagctgttgcagcatccagttcatcttaagaatgtcaacgattagtcatgcaataaatgttctggttttaaaaaatacatatctggttttggtaaggtatttttaatcaattaggcttgtagtatcagtgaaatactgtaggtttagggactgggctagcttcatatcagatttacttgttaagtgactgttttggaatgtttacttttggactgggtttgtaacacggttaaaggcaatgagaaacaagcagaattccaggagtccttgaagcagagggcactggaagacaatatagcagattaaaatagcacagctcatgtggcataggtgggtattttagatgtttgagtaaatttgaaagagtatgatgtttaaattacctttagcaacatgttcatctgctatgctgtcatgactagggggatgattattagtcacatagagcttgggagtaccactggaaacgtatgggtaggagtttaggtggcttctgtttttcaaaagatgatcttatcctagtatctgtaatgctcacttggcacacctgacttgtgggctgtgtgtaaggtggctagctaagtgaaaaaagcctgctaggtgtgagtcaacttaagaatatgtaaataggtttgagaaaaagtagggcttgggtgcaagtaaagattgagcaggaaataaaggaaaatcaagtataatccctgagatttgtagactaaaggcaatgatgtgggactacttggtcgaatttttttagccctcaacttggtaattgggtgtttctgtgttaaagcactgaaacttgctgtcgtgccttcctagttttcgtggtttattgacagggttgggggttttttttgtttttttaaaatgaagggacaaagtcaactggactgctgagtgagagggcaggggcagttgaagggaacatgaattgctggaacagctacataaaatagtgatgtagccaagtcatgctatttaaattataattctccactgtgtttagaataacatctgaggttcttaacctggccttggaagggtatcacttttacttgtaacctggaatggctttataatgtgctagctaattgctactctcatcttgtattttaactcctaatttacccttcaggtctcagcttcagaacattcacttataaagaaaccctgctgattaaatctctcttgggcttcctcccaaaa

SEQ ID NO: 687 - DNA, 420 bp, Homo sapiens
acttccgctcgtccgcctaataccgcgcctgcgcaccgcgtctcttcctttctgggctcggacctaggtcgcggcgacatggccaaacgtaccaagaaagtcgggatcgtcggtaaatacgggacccgctatggggcctccctccggaaaatggtgaagaaaattgaaatcagccagcacgccaagtacacttgctctttctgtggcaaaaccaagatgaagagacgagctgtggggatctggcactgtggttcctgcatgaagacagtggctggcggtgcctggacgtacaataccacttccgctgtcacggtaaagtccgccatcagaagactgaaggagttgaaagaccagtagacgctcctctactctttgagacatcactggcctataataaatgggttaatttatgtaacaaaa

SEQ ID NO: 688 - DNA, 393 bp, Homo sapiens
gcccggaaacggaagtctcgttctttttcgtccttttccccggttgctgcttgctgtgagtgtctctagggtgatacgtgggtgagaaaggtcctggtccgcgccagagcccagcgcgcctcgtcgccatgcctcggaaaattgaggaaatcaaggacttcctgctcacagcccgacgaaaggatgccaaatctgtcaagatcaagaaaaataaggacaacgtgaagtttaaagttcgatgcagcagatacctttacaccctggtcatcactgacaaagagaaggcagagaaactgaagcagtccctgccccccggtttggcagtgaaggaactgaaatgaaccagacacactgattggaactgtattatattaaaatactaaaaatcctaaa

SEQ ID NO: 689 - DNA, 420 bp, Homo sapiens
gccttctaagctcgttcttccgccagcttccctcctcttcctttctccgccatcgtggtgtgttcttgactccgctgctcgccatgtcttctcacaagactttcaggattaagcgattcctggccaagaaacaaaagcaaaatcgtcccattccccagtggattcggatgaaaactggaaataaaatcaggtacaactccaaaaggagacattggagaagaaccaagctgggtctataaggaattgcacatgagatggcacacatatttatgctgtctgaaggtcacgatcatgttaccatatcaagctgaaaatgtcaccactatctggagatttcgacgtgttttcctctctgaatctgttatgaacacgttggttggctggattcagtaataaatatgtaaggcctttctttttaaa

SEQ ID NO: 690 - DNA, 470 bp, Homo sapiens
acccggcgctccattaaatagccgtagacggaacttcgcctttctctcggccttagcgccatttttttggaaacctctgcgccatgagagccaagtggaggaagaagcgaatgcgcaggctgaagcgcaaaagaagaaagatgaggcagaggtccaagtaaaccgctagcttgttgcaccgtggaggccacaggagcagaaacatggaatgccagacgctggggatgctggtacaagttgtgggactgcatgctactgtctagagcttgtctcaatggatctagaacttcatcgccctctgatcgccgatcacctctgagacccaccttgctcataaacaaaatgcccatgttggtcctctgccctggacctgtgacattctggactatttctgtgtttatttgtggccgagtgtaacaaccatataataaatcacctcttccgctgttttagctgaagaattaaatcaa

SEQ ID NO: 691 - DNA, 606 bp, Homo sapiens
gcggccgcggccaatcggagccgctcttgctgcgacgcagcggtcggaagcggagcaaggtcgaggccgggttggcgccggagccggggccgcttggagctcgtgtggggtctccggtccagggcgcggcatgggcgtcctggccgcagcggcgcgctgcctggtccggggtgcggaccgaatgagcaagtggacgagcaagcggggcccgcgcagcttcaggggccgcaagggccggggcgccaagggcatcggcttcctcacctcgggctggaggttcgtgcagatcaaggagatggtcccggagttcgtcgtcccggatctgaccggcttcaagctcaagccctacgtgagctacctcgcccctgagagcgaggagacgcccctgacggccgcgcagctcttcagcgaagccgtggcgcctgccatcgaaaaggacttcaaggacggtaccttcgaccctgacaacctggaaaagtacggcttcgagcccacacaggagggaaagctcttccagctctaccccaggaacttcctgcgctagctgggcgggggaggggcggcctgccctcatctcatttctattaaacgcctttgccagctaaa

SEQ ID NO: 692 - DNA, 1150 bp, Homo sapiens
cgcctgtcttttccgtgctacctgcagaggggtccatacggcgttgttctggattcccgtcgtaacttaaagggaaattttcacaatgtccggagcccttgatgtcctgcaaatgaaggaggaggatgtccttaagttccttgcagcaggaacccacttaggtggcaccaatcttgacttccagatggaacagtacatctataaaaggaaaagtgatggcatctatatcataaatctcaagaggacctgggagaagcttctgctggcagctcgtgcaattgttgccattgaaaaccctgctgatgtcagtgttatatcctccaggaatactggccagagggctgtgctgaagtttgctgctgccactggagccactccaattgctggccgcttcactcctggaaccttcactaaccagatccaggcagccttccgggagccacggcttcttgtggttactgaccccagggctgaccaccagcctctcacggaggcatcttatgttaacctacctaccattgcgctgtgtaacacagattctcctctgcgctatgtggacattgccatcccatgcaacaacaagggagctcactcagtgggtttgatgtggtggatgctggctcgggaagttctgcgcatgcgtggcaccatttcccgtgaacacccatgggaggtcatgcctgatctgtacttctacagagatcctgaagagattgaaaaagaagagcaggctgctgctgagaaggcagtgaccaaggaggaatttcagggtgaatggactgctcccgctcctgagttcactgctactcagcctgaggttgcagactggtctgaaggtgtacaggtgccctctgtgcctattcagcaattccctactgaagactggagcgctcagcctgccacggaagactggtctgcagctcccactgctcaggccactgaatgggtaggagcaaccactgactggtcttaagctgttcttgcataggctcttaagcagcatggaaaaatggttgatggaaaataaacatcagtttctaaaagttgtcttcatttagtttgctttttactccagatcagaatacctgggattgcatatcaaagcataataataaatacatgtctcgacatgagttgtacttctaaaaaa

SEQ ID NO: 693 - DNA, 942 bp, Homo sapiens
cttcttttccgacaaaacaccaaatggcggatgacgccggtgcagcgggggggcccgggggccctggtggccctgggatggggaaccgcggtggcttccgcggaggtttcggcagtggcatccggggccggggtcgcggccgtggacggggccggggccgaggccgcggagctcgcggaggcaaggccgaggataaggagtggatgcccgtcaccaagttgggccgcttggtcaaggacatgaagatcaagtccctggaggagatctatctcttctccctgcctattaaggaatcagagatcattgatttcttcctgggggcctctctcaaggatgaggttttgaagattatgccagtgcagaagcagacccgtgccggccagcgcaccaggttcaaggcatttgttgctatcggggactacaatggccacgtcggtctgggtgttaagtgctccaaggaggtggccaccgccatccgtggggccatcatcctggccaagctctccatcgtccccgtgcgcagaggctactgggggaacaagatcggcaagccccacactgtcccttgcaaggtgacaggccgctgcggctctgtgctggtacgcctcatccctgcacccaggggcactggcatcgtctccgcacctgtgcctaagaagctgctcatgatggctggtatcgatgactgctacacctcagcccggggctgcactgccaccctgggcaacttcgccaaggccacctttgatgccatttctaagacctacagctacctgacccccgacctctggaaggagactgtattcaccaagtctccctatcaggagttcactgaccacctcgtcaagacccacaccagagtctccgtgcagcggactcaggctccagctgtggctacaacatagggtttttatacaagaaaaataaagtgaattaagcgtg

SEQ ID NO: 694 - DNA, 2094 bp, Homo sapiens
atactcacttccgcccgcgagccacttcctttcctttcagcggagcgcggcggcaagatggcagtgcaaatatccaagaagaggaagtttgtcgctgatggcatcttcaaagctgaactgaatgagtttcttactcgggagctggctgaagatggctactctggagttgaggtgcgagttacaccaaccaggacagaaatcattatcttagccaccagaacacagaatgttcttggtgagaagggccggcggattcgggaactgactgctgtagttcagaagaggtttggctttccagagggcagtgtagagctttatgctgaaaaggtggccactagaggtctgtgtgccattgcccaggcagagtctctgcgttacaaactcctaggagggcttgctgtgcggagggcctgctatggtgtgctgcggttcatcatggagagtggggccaaaggctgcgaggttgtggtgtctgggaaactccgaggacagagggctaaatccatgaagtttgtggatggcctgatgatccacagcggagaccctgttaactactacgttgacactgctgtgcgccacgtgttgctcagacagggtgtgctgggcatcaaggtgaagatcatgctgccctgggacccaactggtaagattggccctaagaagcccctgcctgaccacgtgagcattgtggaacccaaagatgagatactgcccaccacccccatctcagaacagaagggtgggaagccagagccgcctgccatgccccagccagtccccacagcataacagggtctccttggcagctgtattctggagtctggatgttgctctctaaagacctttaataaaattttgtacaaagacacaaggtctgactagactgttcagtattcagactgaggggcatgttggcctctggagcattacatatcttcttggttttaaccatacttgtggtatttgcaagggccagaacagtaagacccaagcagagccaaccagagaaataatatttgtgtgatagagaaggctgatagcaagcaaggcagcaccttgattcgttgtcctgtagttcaggattgtaggtttagaagagggatatgtttgagtttttcctatgcataaggcgatccacgttgcacatagaaagtgaatataaatggccattatattttgtgtcatgctgtgctctaagtgttctttacatatgtactcgttaatcaacctctctaaagtgtaaaggaaatttgcttgcaccactgaaggcacataaggctcagaagtaaatttgcctaagcagtataaagctatcattagaatccacattcctaagttgtgttctcttaggggatcatggaaccagtcattggtactacaggctattatgttctggagaactgtgaagaacatttaaattgtctctgattttatctatcaatgttttgaagtattttctaccagtgtctgtacttcacaagaaattcggcactattttttcaggcaaaactagtgagggacaggttggcttgaaaatcatgagactgttgttaaatcagatgctggttgatcacagaggggacttccagggaaagctgttatcaggtggctgcttcctggtgatgcagcctggctgatgagataaccctggctccacagatggcttagcaggtgctgtgatgatttggttttcttctcaattagactgagctgcacatggtgtttatattgcttggcacatggtaagggcttaatatttgaggtaattatgtagggcgtacactgacaagtatctgacccccccttcctttttgactcataaattggtcatcttaaccatttaagtgtacacttctatagtgacagagttagccctctgtccaagggatttgcatctgtggattcaaccaactttgggtcaaaaataatcaaaaaggatggttgtgtgtgtattgaacatgtagacttatttttcttattttcaaaatactatattttcttgtcacttattttcttgtacactgcagttgtaacagctatgtagcatgtacattaggtattaaaagtaatccagtgaagattgaaagtctaaaa

SEQ ID NO: 695 - DNA, 933 bp, Homo sapiens
tagacggcgcgccccgcccccgtacgcctaagttctcgcgcgactcccacttccgcccttttggctctctgaccagcaccatggcggttggcaagaacaagcgccttacgaaaggcggcaaaaagggagccaagaagaaagtggttgatccattttctaagaaagattggtatgatgtgaaagcacctgctatgttcaatataagaaatattggaaagacgctcgtcaccaggacccaaggaaccaaaattgcatctgatggtctcaagggtcgtgtgtttgaagtgagtcttgctgatttgcagaatgatgaagttgcatttagaaaattcaagctgattactgaagatgttcagggtaaaaactgcctgactaacttccatggcatggatcttacccgtgacaaaatgtgttccatggtcaaaaaatggcagacaatgattgaagctcacgttgatgtcaagactaccgatggttacttgcttcgtctgttctgtgttggttttactaaaaaacgcaacaatcagatacggaagacctcttatgctcagcaccaacaggtccgccaaatccggaagaagatgatggaaatcatgacccgagaggtgcagacaaatgacttgaaagaagtggtcaataaattgattccagacagcattggaaaagacatagaaaaggcttgccaatctatttatcctctccatgatgtcttcgttagaaaagtaaaaatgctgaagaagcccaagtttgaattgggaaagctcatggagcttcatggtgaaggcagtagttctggaaaagccactggggacgagacaggtgctaaagttgaacgagctgatggatatgaaccaccagtccaagaatctgtttaaagttcagacttcaaatagtggcaaataaaaagtgctatttgtgatggtttgcttctga

SEQ ID NO: 696 - DNA, 956 bp, Homo sapiens
gggcggagcagctgaaaatccggcgcgcgcagtctccagccccaatttctacgcgcaccggaagacggaggtcctctttccttgcctaacgcagccatggctcgtggtcccaagaagcatctgaagcgggtggcagctccaaagcattggatgctggataaattgaccggtgtgtttgctcctcgtccatccaccggtccccacaagttgagagagtgtctccccctcatcattttcctgaggaacagacttaagtatgccctgacaggagatgaagtaaagaagatttgcatgcagcggttcattaaaatcgatggcaaggtccgaactgatataacctaccctgctggattcatggatgtcatcagcattgacaagacgggagagaatttccgtctgatctatgacaccaagggtcgctttgctgtacatcgtattacacctgaggaggccaagtacaagttgtgcaaagtgagaaagatctttgtgggcacaaaaggaatccctcatctggtgactcatgatgcccgcaccatccgctaccccgatcccctcatcaaggtgaatgataccattcagattgatttggagactggcaagattactgatttcatcaagttcgacactggtaacctgtgtatggtgactggaggtgctaacctaggaagaattggtgtgatcaccaacagagagaggcaccctggatcttttgacgtggttcacgtgaaagatgccaatggcaacagctttgccactcgactttccaacatttttgttattggcaagggcaacaaaccatggatttctcttccccgaggaaagggtatccgcctcaccattgctgaagagagagacaaaagactggcggccaaacagagcagtgggtgaaatgggtccctgggtgacatgtcagatctttgtacgtaattaaaaatattgtggcaggattaatagca

SEQ ID NO: 697 - DNA, 900 bp, Homo sapiens
gcaccggaaaagaacagattctcttccgtcgcagagtttcgccatggcccggggccccaagaagcacttaaagcgtgttgcagcgccgaagcattggatgcttgacaaactaacgggtgtatttgcacctcgtccatcgacaggtccccacaagctgagggaatgtcttcctctgatcgtcttcctcaggaatagactcaagtatgcgttgactggagatgaggtaaagaagatatgtatgcaacgtttcatcaaaattgatggcaaggttcgagtggatgtcacataccctgctggattcatggatgtcatcagcatcgagaagacaggtgaacatttccgcctggtctatgacaccaagggccgttttgctgttcaccgcatcacagtggaagaggcaaagtacaagttgtgcaaagtgaggaagattactgtgggagtgaagggaatccctcacctggtgactcatgatgctcgaaccatccgctacccagatcctgtcatcaaggtgaacgatactgtgcagattgatttagggactggcaagataatcaactttatcaaatttgatacaggcaatttgtgtatggtgattggtggagccaacctcggtcgtgttggtgtgatcaccaacagggaaagacatcctggttcttttgatgtggtgcatgtgaaggatgccaatggcaacagctttgccacgaggctttccaacatttttgtcattggcaatggcaataaaccttggatttccctgcccaggggaaagggcattcgacttactgttgctgaagagagagataagaggctggccaccaaacagagcagtggctaaattgcagtagcagcatatctttttttctttgcacaaataaacagtgaattctcgtttcttaaaaa

SEQ ID NO: 698 - DNA, 744 bp, Homo sapiens
ctcttcctgtctgtaccagggcggcgcgtggtctacgccgagtgacagagacgctcaggctgtgttctcaggatgaccgagtgggagacagcagcaccagcggtggcagagaccccagacatcaagctctttgggaagtggagcaccgatgatgtgcagatcaatgacatttccctgcaggattacattgcagtgaaggagaagtatgccaagtacctgcctcacagtgcagggcggtatgccgccaaacgcttccgcaaagctcagtgtcccattgtggagcgcctcactaactccatgatgatgcacggccgcaacaacggcaagaagctcatgactgtgcgcatcgtcaagcatgccttcgagatcatacacctgctcacaggcgagaaccctctgcaggtcctggtgaacgccatcatcaacagtggtccccgggaggactccacacgcattgggcgcgccgggactgtgagacgacaggctgtggatgtgtcccccctgcgccgtgtgaaccaggccatctggctgctgtgcacaggcgctcgtgaggctgccttccggaacattaagaccattgctgagtgcctggcagatgagctcatcaatgctgccaagggctcctcgaactcctatgccattaagaagaaggacgagctggagcgtgtggccaagtccaaccgctgattttcccagctgctgcccaataaacctgtctgccctttggggcagtcccagccaaaa

SEQ ID NO: 699 - DNA, 829 bp, Homo sapiens
cctcttttccgtggcgcctcggaggcgttcagctgcttcaagatgaagctgaacatctccttcccagccactggctgccagaaactcattgaagtggacgatgaacgcaaacttcgtactttctatgagaagcgtatggccacagaagttgctgctgacgctctgggtgaagaatggaagggttatgtggtccgaatcagtggtgggaacgacaaacaaggtttccccatgaagcagggtgtcttgacccatggccgtgtccgcctgctactgagtaaggggcattcctgttacagaccaaggagaactggagaaagaaagagaaaatcagttcgtggttgcattgtggatgcaaatctgagcgttctcaacttggttattgtaaaaaaaggagagaaggatattcctggactgactgatactacagtgcctcgccgcctgggccccaaaagagctagcagaatccgcaaacttttcaatctctctaaagaagatgatgtccgccagtatgttgtaagaaagcccttaaataaagaaggtaagaaacctaggaccaaagcacccaagattcagcgtcttgttactccacgtgtcctgcagcacaaacggcggcgtattgctctgaagaagcagcgtaccaagaaaaataaagaagaggctgcagaatatgctaaacttttggccaagagaatgaaggaggctaaggagaagcgccaggaacaaattgcgaagagacgcagactttcctctctgcgagcttctacttctaagtctgaatccagtcagaaataagattttttgagtaacaaataaataagatcagactctg

SEQ ID NO: 700 - DNA, 730 bp, Homo sapiens
gcgctgtttccgcctcttgccttcggacgccggattttgacgtgctctcgcgagatttgggtctcttcctaagccggcgctcggcaagttctcccaggagaaagccatgttcagttcgagcgccaagatcgtgaagcccaatggcgagaagccggacgagttcgagtccggcatctcccaggctcttctggagctggagatgaactcggacctcaaggctcagctcagggagctgaatattacggcagctaaggaaattgaagttggtggtggtcggaaagctatcataatctttgttcccgttcctcaactgaaatctttccagaaaatccaagtccggctagtacgcgaattggagaaaaagttcagtgggaagcatgtcgtctttatcgctcagaggagaattctgcctaagccaactcgaaaaagccgtacaaaaaataagcaaaagcgtcccaggagccgtactctgacagctgtgcacgatgccatccttgaggacttggtcttcccaagcgaaattgtgggcaagagaatccgcgtcaaactagatggcagccggctcataaaggttcatttggacaaagcacagcagaacaatgtggaacacaaggttgaaactttttctggtgtctataagaagctcacgggcaaggatgttaattttgaattcccagagtttcaattgtaaacaaaaatgactaaataaaaagtatatattcacagtaaa

SEQ ID NO: 701 - DNA, 705 bp, Homo sapiens
ctctttccagccagcgccgagcgatgggcatctctcgggacaactggcacaagcgccgcaaaaccgggggcaagagaaagccctaccacaagaagcggaagtatgagttggggcgcccagctgccaacaccaagattggcccccgccgcatccacacagtccgtgtgcggggaggtaacaagaaataccgtgccctgaggttggacgtggggaatttctcctggggctcagagtgttgtactcgtaaaacaaggatcatcgatgttgtctacaatgcatctaataacgagctggttcgtaccaagaccctggtgaagaattgcatcgtgctcatcgacagcacaccgtaccgacagtggtacgagtcccactatgcgctgcccctgggccgcaagaagggagccaagctgactcctgaggaagaagagattttaaacaaaaaacgatctaaaaaaattcagaagaaatatgatgaaaggaaaaagaatgccaaaatcagcagtctcctggaggagcagttccagcagggcaagcttcttgcgtgcatcgcttcaaggccgggacagtgtggccgagcagatggctatgtgctagagggcaaagagttggagttctatcttaggaaaatcaaggcccgcaaaggcaaataaatccttgttttgtcttcacccatgtaataaaggtgtttattgttttgttcccaca

SEQ ID NO: 702 - DNA, 713 bp, Homo sapiens
ctctttctcagtgaccgggtggtttgcttaggcgcagacggggaagcggagccaacatgccagtggcccggagctgggtttgtcgcaaaacttatgtgaccccgcggagacccttcgagaaatctcgtctcgaccaagagctgaagctgatcggcgagtatgggctccggaacaaacgtgaggtctggagggtcaaatttaccctggccaagatccgcaaggccgcccgggaactgctgacgcttgatgagaaggacccacggcgtctgttcgaaggcaacgccctgctgcggcggctggtccgcattggggtgctggatgagggcaagatgaagctggattacatcctgggcctgaagatagaggatttcttagagagacgcctgcagacccaggtcttcaagctgggcttggccaagtccatccaccacgctcgcgtgctgatccgccagcgccatatcagggtccgcaagcaggtggtgaacatcccgtccttcattgtccgcctggattcccagaagcacatcgacttctctctgcgctctccctacgggggtggccgcccgggccgcgtgaagaggaagaatgccaagaagggccagggtggggctggggctggagacgacgaggaggaggattaagtccacctgtccctcctgggctgctggattgtctcgttttcctgccaaataaacaggatcagcgctttacaa

SEQ ID NO: 703 - DNA, 643 bp, Homo sapiens
ggcggggggcgggtccacgccagcccggaagagacgcagcaccgcgcatgctccttcctttccagccccggtaccggaccctgcagccgcagagatgttgatgcctaagaagaaccggattgccatttatgaactcctttttaaggagggagtcatggtggccaagaaggatgtccacatgcctaagcacccggagctggcagacaagaatgtgcccaaccttcatgtcatgaaggccatgcagtctctcaagtcccgaggctacgtgaaggaacagtttgcctggagacatttctactggtaccttaccaatgagggtatccagtatctccgtgattaccttcatctgcccccggagattgtgcctgccaccctacgccgtagccgtccagagactggcaggcctcggcctaaaggtctggagggtgagcgacctgcgagactcacaagaggggaagctgacagagatacctacagacggagtgctgtgccacctggtgccgacaagaaagccgaggctggggctgggtcagcaaccgaattccagtttagaggcggatttggtcgtggacgtggtcagccacctcagtaaaattggagaggattcttttgcattgaataaacttacagccaaaaaacctta

SEQ ID NO: 704 - DNA, 646 bp, Homo sapiens
tctccttacgtcacttcctctccagcccctgcgtaatcgataaggaaacccggacgctgctgcccctttctttttttcaggcggccgggaagatggcggacattcagactgagcgtgcctaccaaaagcagccgaccatctttcaaaacaagaagagggtcctgctgggagaaactggcaaggagaagctcccgcggtactacaagaacatcggtctgggcttcaagacacccaaggaggctattgagggcacctacattgacaagaaatgccccttcactggtaatgtgtccattcgagggcggatcctctctggcgtggtgaccaagatgaagatgcagaggaccattgtcatccgccgagactatctgcactacatccgcaagtacaaccgcttcgagaagcgccacaagaacatgtctgtacacctgtccccctgcttcagggacgtccagatcggtgacatcgtcacagtgggcgagtgccggcctctgagcaagacagtgcgcttcaacgtgctcaaggtcaccaaggctgccggcaccaagaagcagttccagaagttctgaggctggacatcggcccgctccccacaatgaaataaagttattttctcattcccaggccagacttgggatcttccgcg

SEQ ID NO: 705 - DNA, 505 bp, Homo sapiens
ctctttccctgccgccgccgagtcgcgcggaggcggaggcttgggtgcgttcaagattcaacttcacccgtaacccaccgccatggccgaggaaggcattgctgctggaggtgtaatggacgttaatactgctttacaagaggttctgaagactgccctcatccacgatggcctagcacgtggaattcgcgaagctgccaaagccttagacaagcgccaagcccatctttgtgtgcttgcatccaactgtgatgagcctatgtatgtcaagttggtggaggccctttgtgctgaacaccaaatcaacctaattaaggttgatgacaacaagaaactaggagaatgggtaggcctttgtaaaattgacagagaggggaaaccccgtaaagtggttggttgcagttgtgtagtagttaaggactatggcaaggagtctcaggccaaggatgtcattgaagagtatttcaaatgcaagaaatgaagaaataaatctttggctcacaaa

SEQ ID NO: 706 - DNA, 529 bp, Homo sapiens
cgctctcctttcgttgcctgatcgccgccatcatgggtcgcatgcatgctcccgggaagggcctgtcccagtcggctttaccctatcgacgcagcgtccccacttggttgaagttgacatctgacgacgtgaaggagcagatttacaaactggccaagaagggccttactccttcacagatcggtgtaatcctgagagattcacatggtgttgcacaagtacgttttgtgacaggcaataaaattttaagaattcttaagtctaagggacttgctcctgatcttcctgaagatctctaccatttaattaagaaagcagttgctgttcgaaagcatcttgagaggaacagaaaggataaggatgctaaattccgtctgattctaatagagagccggattcaccgtttggctcgatattataagaccaagcgagtcctccctcccaattggaaatatgaatcatctacagcctctgccctggtcgcataaatttgtctgtgtactcaagcaataaaatgattgtttaacta

SEQ ID NO: 707 - DNA, 568 bp, Homo sapiens
ctccgccccctcccactctctctttccggtgtggagtctggagacgacgtgcagaaatggcacctcgaaaggggaaggaaaagaaggaagaacaggtcatcagcctcggacctcaggtggctgaaggagagaatgtatttggtgtctgccatatctttgcatccttcaatgacacttttgtccatgtcactgatctttctggcaaggaaaccatctgccgtgtgactggtgggatgaaggtaaaggcagaccgagatgaatcctcaccatatgctgctatgttggctgcccaggatgtggcccagaggtgcaaggagctgggtatcaccgccctacacatcaaactccgggccacaggaggaaataggaccaagacccctggacctggggcccagtcggccctcagagcccttgcccgctcgggtatgaagatcgggcggattgaggatgtcacccccatcccctctgacagcactcgcaggaaggggggtcgccgtggtcgccgtctgtgaacaagattcctcaaaatattttctgttaataaattgccttcatgtaaactgtttca

SEQ ID NO: 708 - DNA, 531 bp, Homo sapiens
ggcagtctcgcgataactgcgcaggcgcggaccaaagcgatctcttctgaggatccggcaagatggcagaagtagagcagaagaagaagcggaccttccgcaagttcacctaccgcggcgtggacctcgaccagctgctggacatgtcctacgagcagctgatgcagctgtacagtgcgcgccagcggcggcggctgaaccggggcctgcggcggaagcagcactccctgctgaagcgcctgcgcaaggccaagaaggaggcgccgcccatggagaagccggaagtggtgaagacgcacctgcgggacatgatcatcctacccgagatggtgggcagcatggtgggcgtctacaacggcaagaccttcaaccaggtggagatcaagcccgagatgatcggccactacctgggcgagttctccatcacctacaagcccgtaaagcatggccggcccggcatcggggccacccactcctcccgcttcatccctctcaagtaatggctcagctaataaaggcgcacatgactcc

SEQ ID NO: 709 - DNA, 544 bp, Homo sapiens
ctctttccgccatctttccgcgccggtgagtagcactctctgagagctccaatttcatccgtctgccatcggcgccatcctgcaatctaagccacaatggtgcgcatgaatgtcctggcagatgctctcaagagtatcaacaatgccgaaaagagaggcaaacgccaggtgcttattaggccgtgctccaaagtcatcgtccggtttctcactgtgatgatgaagcatggttacattggcgaatttgaaatcattgatgaccacagagctgggaaaattgttgtgaacctcacaggcaggctaaacaagtgtggggtgatcagccccagatttgacgtgcaactcaaagacctggaaaaatggcagaataatctgcttccatcccgccagtttggtttcattgtactgacaacctcagctggcatcatggaccatgaagaagcaagacgaaaacacacaggagggaaaatcctgggattctttttctagggatgtaatacatatatttacaaataaaatgcctcatggactctggtgcttccaa

SEQ ID NO: 710 - DNA, 590 bp, Homo sapiens
gaaaagcggccagggtggcccctagctttccttttccggttgcggcgccgcgcggtgaggttgtctagtccacgctcggagccatgccgtccaagggcccgctgcagtctgtgcaggtcttcggacgcaagaagacagcgacagctgtggcgcactgcaaacgcggcaatggtctcatcaaggtgaacgggcggcccctggagatgattgagccgcgcacgctacagtacaagctgctggagccagttctgcttctcggcaaggagcgatttgctggtgtagacatccgtgtccgtgtaaagggtggtggtcacgtggcccagatttatgctatccgtcagtccatctccaaagccctggtggcctattaccagaaatatgtggatgaggcttccaagaaggagatcaaagacatcctcatccagtatgaccggaccctgctggtagctgaccctcgtcgctgcgagtccaaaaagtttggaggccctggtgcccgcgctcgctaccagaaatcctaccgataagcccatcgtgactcaaaactcacttgtataataaacagtttttgagggattttaaagtttcaagaa

SEQ ID NO: 711 - DNA, 490 bp, Homo sapiens
gtttcctcttttaccaaggacccgccaacatgggccgcgttcgcaccaaaaccgtgaagaaggcggcccgggtcatcatagaaaagtactacacgcgcctgggcaacgacttccacacgaacaagcgcgtgtgcgaggagatcgccattatccccagcaaaaagctccgcaacaagatagcaggttatgtcacgcatctgatgaagcgaattcagagaggcccagtaagaggtatctccatcaagctgcaggaggaggagagagaaaggagagacaattatgttcctgaggtctcagccttggatcaggagattattgaagtagatcctgacactaaggaaatgctgaagcttttggacttcggcagtctgtccaaccttcaggtcactcagcctacagttgggatgaatttcaaaacgcctcggggacctgtttgaattttttctgtagtgctgtattattttcaataaatctgggacaacagcaaaaa

SEQ ID NO: 712 - DNA, 544 bp, Homo sapiens
ctctcttccacaggaggcctacacgccgccgcttgtgctgcagccatgtctctagtgatccctgaaaagttccagcatattttgcgagtactcaacaccaacatcgatgggcggcggaaaatagcctttgccatcactgccattaagggtgtgggccgaagatatgctcatgtggtgttgaggaaagcagacattgacctcaccaagagggcgggagaactcactgaggatgaggtggaacgtgtgatcaccattatgcagaatccacgccagtacaagatcccagactggttcttgaacagacagaaggatgtaaaggatggaaaatacagccaggtcctagccaatggtctggacaacaagctccgtgaagacctggagcgactgaagaagattcgggcccatagagggctgcgtcacttctggggccttcgtgtccgaggccagcacaccaagaccactggccgccgtggccgcaccgtgggtgtgtccaagaagaaataagtctgtaggccttgtctgttaataaatagtttatatacaa

SEQ ID NO: 713 - DNA, 1190 bp, Homo sapiens
aaatggacgagaggtcagggtaggtttttgaagatggcggccctcaaggctctggtgtccggctgtgggcggcttctccgtgggctactagcgggcccggcagcgaccagctggtctcggcttccagctcgcgggttcagggaagtggtggagacccaagaagggaagacaactataattgaaggccgtatcacagcgactcccaaggagagtccaaatcctcctaacccctctggccagtgccccatctgccgttggaacctgaagcacaagtataactatgacgatgttctgctgcttagccagttcatccggcctcatggaggcatgctgccccgaaagatcacaggcctatgccaggaagaacaccgcaagatcgaggagtgtgtgaagatggcccaccgagcaggtctattaccaaatcacaggcctcggcttcctgaaggagttgttccgaagagcaaaccccaactcaaccggtacctgacgcgctgggctcctggctccgtcaagcccatctacaaaaaaggcccccgctggaacagggtgcgcatgcccgtggggtcaccccttctgagggacaatgtctgctactcaagaacaccttggaagctgtatcactgacagagagcagtgcttccagagttcctcctgcacctgtgctggggagtaggaggcccactcacaagcccttggccacaactatactcctgtcccaccccaccacgatggcctggtccctccaacatgcatggacaggggacagtgggactaacttcagtacccttggcctgcacagtagcaatgctgggagctagaggcaggcagggcagttgggtcccttgccagctgctatggggcttaggccatgctcagtgctggggacaggagttttgcccaacgcagtgtcataaactgggttcatgggcttacccattgggtgtgcgctcactgcttgggaagtgcagggggtcctgggcacattgccagctgggtgctgagcattgagtcactgatctcttgtgatggggccaatgagtcaattgaattcatgggccaaacaggtcccatcctcttcatgacagctgtgagctccttactgtgggagagctgcagggagccaaggtgggctgcctgacacacttgccgctctcgtgtgaatccaagaaactgcgttcctcaaaggggca

SEQ ID NO: 714 - DNA, 850 bp, Homo sapiens
gtactttcgccatcatagtattctccaccactgttccttccagccacgaacgacgcaaacgaagccaagttcccccagctccgaacaggagctctctatcctctctctattacactccgggagaaggaaacgcgggaggaaacccaggcctccacgcgcgaccccttggccctcccctttacctctccacccctcactagacaccctcccctctaggcggggacgaactttcgccctgagagaggcggagcctcagcgtctaccctcgctctcgcgagctttcggaactctcgcgagaccctacgcccgacttgtgcgcccgggaaaccccgtcgttccctttcccctggctggcagcgcggaggccgcacgatgcctggagttactgtaaaagacgtgaaccagcaggagttcgtcagagctctggcagccttcctcaaaaagtccgggaagctgaaagtccccgaatgggtggataccgtcaagctggccaagcacaaagagcttgctccctacgatgagaactggttctacacgcgagctgcttccacagcgcggcacctgtacctccggggtggcgctggggttggctccatgaccaagatctatgggggacgtcagagaaacggcgtcatgcccagccacttcagccgaggctccaagagtgtggcccgccgggtcctccaagccctggaggggctgaaaatggtggaaaaggaccaagatggcggccgcaaactgacacctcagggacaaagagatctggacagaatcgccggacaggtggcagctgccaacaagaagcattagaacaaaccatgctgggttaataaattgcctcattcgtaaa

SEQ ID NO: 715 - DNA, 840 bp, Homo sapiens
atatttcctgttccggggcgtgtgggacccggatgcaagcgtgctatataagcgttgctcaagtcccacccctttctttttgaggaagacgcggtcgtaagggctgaggatttttggtccgcacgctcctgctcctgactcaccgctgttcgctctcgccgaggaacaagtcggtcaggaagcccgcgcgcaacagccatggcttttaaggataccggaaaaacacccgtggagccggaggtggcaattcaccgaattcgaatcaccctaacaagccgcaacgtaaaatccttggaaaaggtgtgtgctgacttgataagaggcgcaaaagaaaagaatctcaaagtgaaaggaccagttcgaatgcctaccaagactttgagaatcactacaagaaaaactccttgtggtgaaggttctaagacgtgggatcgtttccagatgagaattcacaagcgactcattgacttgcacagtccttctgagattgttaagcagattacttccatcagtattgagccaggagttgaggtggaagtcaccattgcagatgcttaagtcaactattttaataaattgatgaccagttgttaacttctgttggtttttattcagaatactggcagattttaggaatataaaggtgtactatgagacttccacttttcaggtggaatatatgggtatcttagagtggtctatcctgttttcgttgtcgtttgagtcatttgaaaactggattccgttaactacataatatgtgagacctgactggttttattggacactggcagtttataactttggcatactctagataaattctgattggtatgggga

SEQ ID NO: 716 - DNA, 400 bp, Homo sapiens
cttgcccgccgatatctctgccgggtgactagctgcttcctttctctctcgcgcgcggtgtggtggcagcaggcgcagcccagcctcgaaatgcagaacgacgccggcgagttcgtggacctgtacgtgccgcggaaatgctccgctagcaatcgcatcatcggtgccaaggaccacgcatccatccagatgaacgtggccgaggttgacaaggtcacaggcaggtttaatggccagtttaaaacttatgctatctgcggggccattcgtaggatgggtgagtcagatgattccattctccgattggccaaggccgatggcatcgtctcaaagaacttttgactggagagaatcacagatgtggaatatttgtcataaataaataatgaaaacctaaaaa

SEQ ID NO: 717 - DNA, 3313 bp, Homo sapiens
ggggtccttggctgggcggggcttgctcgcggtggcttgtggctccttcctgcggtgcttctctctttcgctcaggcccgtggcgccgacaggatgggcaagtgtcgtggacttcgtactgctaggaagctccgtagtcaccgacgagaccagaagtggcatgataaacagtataagaaagctcatttgggcacagccctaaaggccaacccttttggaggtgcttctcatgcaaaaggaatcgtgctggaaaaagtaggagttgaagccaaacagccaaattctgccattaggaagtgtgtaagggtccagctgatcaagaatggcaagaaaatcacagcctttgtacccaatgacggttgcttgaactttattgaggaaaatgatgaagttctggttgctggatttggtcgcaaaggtcatgctgttggtgatattcctggagtccgctttaaggttgtcaaagtagccaatgtttctcttttggccctatacaaaggcaagaaggaaagaccaagatcataaatattaatggtgaaaacactgtagtaataaattttcatatgccaaaaaatgtttgtatcttactgtcccctgttctcaccacgaagatcatgttcattaccaccaccacccccccttattttttttatcctaaaccagcaaacgcaggacctgtaccaattttaggagacaataagacagggttgtttcaggattctctagagttaataacatttgtaacctggcacagtttccctcatcctgtggaataagaaaatgggatagatctggaataaatgtgcagtattgtagtattactttaagaactttaagggaacttcaaaaactcactgaaattctagtgagatactttcttttttattcttggtattttccatatcgggtgcaacacttcagttaccaaatttcattgcacatagattatcttaggtacccttggaaatgcacattcttgtatccatcttacaggggcccaagatgataaatagtaaactcaaaattgctccccactctgtttattatttaaaggtgtcaggatctgtgttgtaatgtgtctacattaatgtgtttaggagaatacaggcattggatcatttagttgatggaagtatatgccaggcaagggagataaggtatacgacaagactgatgttttcagtatcttctcatgaggttgtcagagaccttcatgtcttcaaagactagtcagcaaatgaagtggtttagtgtagagacaagattggttgtgttttgataatttaagctaggtattgagtacatgtggattttgctgtccacaaatacttgtttcagagttttcatggatacagtggcatggttgaaatgaagctgtgagccttctgctttaaatctgatgtaagaaactcctgttaacaaatagtaagtatgggttaattagccctttgatcaaagcctagctttacattgtttaggatctttggaaaacaattggtttggttgcccactttccgtaggatcaagagcagaacctttcacatggcacagaagaacccaggttgcgcttcatacctgcatattccagccttagcctgccatttctctccttggcactttgtgctccagcaacactggtctcagttggtcatcctcaaacttgggttccatatccagcctcaggacctctgttcctgttactatggttccttgcatgtcgcctgctcttactaaagagctcgtgtgttttccagcacacttcggtttatctcttgatgatgatgctagtctctccctccgcaagggcggaaaggctgcctgttggtttgtaccagtgtttcctaacgtgtagctgcagtcagtatttggctaagctgttcccaggggctcaacagatgctttcggatgagccttaactgacccaatcctttgtgatgcgggagagattgctaggcctcgctcacctggccagaaccagggaaagaggccgcggttgcagcgcgattccaggccctgggcgtcaggcgcggggtgggcagctctccccgggcggtggggcccttgtgaccgcgaggcggggcgcaccaggaagggagtgggacagcgcgggcgcccagggatgtggcctggttacctgccttctctgatacgtcaagacaccttcaacaatggcttgcagctgtaccctgttggctgcacccaggacgcccttttcactgctaagcagtcctacctgaggcccaggggctgccagattgacccataaataatctccggcgcctcagatccagaagctgctgagcctgatcttagtgccttctcctttctctgtgtggccccccagcccctttccccactgccttgtgtccaaggccctttccttcatgtatccatggaggagagacaaaaatacacatcaataaaataagatagggaatccataaatagacattcagaagtatggccaacggatttatcttaaaaccaatggaggaagaagagtttcaataaatgttgtggacttccatttgtcaaagaccaaaacaaaggaaccccaaccttacatgtaatacaaacttaactcaaaatggatcatatatctaaatgtaaaatggaaagctataaaactgaaaacagactatctttacaacctaggcgtaggtatagtttttagacattacaccaaaagcacatgccgtaaaagaaaaaatagataaattggtggatttcattaaaattaaaaaactttttctctctgaaaaatcctgttaagctgggcgctgtggttcatgcctgtaatcccagcactttgggaggctgagttgggaagaaattaatagcttgaggccaggagttcaagatcatcctgggcagcaaagtcatacactcttgagggaagagagagaccttctcatattgttttatattgttttatactcagtacctgttttaagaaaaaaacaaggaagtgaaatcaaagacaggcagcccggcaccaggcctgaaaccagccctgggcctgcctggcctaaacctagtagttaaaaatcaacttacgacttagaacctgatgttatccgtagattccaagcattgtataaaaaaattgtgaaactccctgttgtgttctgtaccagtgcatgaaacccctgtcacatatcccctagattgctcaatcaatcacgaccctttcatgtgaaatctttagtgttgtgagcccttaaaagggacagaaattgtgcacttgaggagctcagattttaaggctgtagcttgccgatgctcccagctgaataaagcccttccttctaca

SEQ ID NO: 718 - DNA, 634 bp, Homo sapiens
aggcatcggcgcggtcagcctcgtggcgcgcccacgcccccacgccggctcttcccggggtccttccgtgcgcgttgatatgattggccggcgaatcgtggttctcttttcctccttggctgtctgaagatagatcgccatcatgaacgacaccgtaactatccgcactagaaagttcatgaccaaccgactacttcagaggaaacaaatggtcattgatgtccttcaccccgggaaggcgacagtgcctaagacagaaattcgggaaaaactagccaaaatgtacaagaccacaccggatgtcatctttgtatttggattcagaactcattttggtggtggcaagacaactggctttggcatgatttatgattccctggattatgcaaagaaaaatgaacccaaacatagacttgcaagacatggcctgtatgagaagaaaaagacctcaagaaagcaacgaaaggaacgcaagaacagaatgaagaaagtcagggggactgcaaaggccaatgttggtgctggcaaaaagccgaaggagtaaaggtgctgcaatgatgttagctgtggccactgtggatttttcgcaagaacattaataaactaaaaacttcatgtgtctggttgtttgaaa

SEQ ID NO: 719 - DNA, 490 bp, Homo sapiens
cttcctttttgtccgacatcttgacgaggctgcggtgtctgctgctattctccgagcttcgcaatgccgcctaaggacgacaagaagaagaaggacgctggaaagtcggccaagaaagacaaagacccagtgaacaaatccgggggcaaggccaaaaagaagaagtggtccaaaggcaaagttcgggacaagctcaataacttagtcttgtttgacaaagctacctatgataaactctgtaaggaagttcccaactataaacttataaccccagctgtggtctctgagagactgaagattcgaggctccctggccagggcagcccttcaggagctccttagtaaaggacttatcaaactggtttcaaagcacagagctcaagtaatttacaccagaaataccaagggtggagatgctccagctgctggtgaagatgcatgaataggtccaaccagctgtacatttggaaaaataaaactttattaaatca

SEQ ID NO: 720 - DNA, 680 bp, Homo sapiens
ggagacacataacctcgattttcttccgccatccggctaaatagtcccatgtgcactttgttccatggataaataaacactaggaacgcatttccaccctagatttcagcagaaatgctgaatgtaaaggaatatttgagtaaagtgagttgccgttcttgaagcccgtctcctaaggattctcccggtgtccgcgtagggatctcatgctatataggagggccctgccaggcaccgtctcctctctccggtccgtgcctccaagatgacaaagaaaagaaggaacaatggtcgtgccaaaaagggccgcggccacgtgcagcctattcgctgcactaactgtgcccgatgcgtgcccaaggacaaggccattaagaaattcgtcattcgaaacatagtggaggccgcagcagtcagggacatttctgaagcgagcgtcttcgatgcctatgtgcttcccaagctgtatgtgaagctacattactgtgtgagttgtgcaattcacagcaaagtagtcaggaatcgatctcgtgaagcccgcaaggaccgaacacccccaccccgatttagacctgcgggtgctgccccacgtcccccaccaaagcccatgtaaggagctgagttcttaaagactgaagacaggctattctctggagaaaaataaaatggaaattgtactt

SEQ ID NO: 721 - DNA, 352 bp, Homo sapiens
ctttccggcggtgacgacctacgcacacgagaacatgcctctcgcaaaggatctccttcatccctctccagaagaggagaagaggaaacacaagaagaaacgcctggtgcagagccccaattcctacttcatggatgtgaaatgcccaggatgctataaaatcaccacggtctttagccatgcacaaacggtagttttgtgtgttggctgctccactgtcctctgccagcctacaggaggaaaagcaaggcttacagaaggatgttccttcaggaggaagcagcactaaaagcactctgagtcaagatgagtgggaaaccatctcaataaacacattttggataaatcctga

SEQ ID NO: 722 - DNA, 1068 bp, Homo sapiens
ctcgacctccttttaaaaattctcttagccacgttgattgtacgggaaaagcctttttaaaacatcttttacgttgcttaaacctacagtttcgaaagcattccgaaggctaaagtgagaaataagcccaggctagggagaggagaaacgaagttcacgtcctagtctggcaccgggttggattgtcgctgggacggcagtcaggcatttggtgtggtcgcctaaggggtgggtccttcggcgggagctccgggaaaccccgtgggcctgcgcggcgttcttccttttcgatccgccatctgcggtggagccgccaccaaaatgcagattttcgtgaaaacccttacggggaagaccatcaccctcgaggttgaaccctcggatacgatagaaaatgtaaaggccaagatccaggataaggaaggaattcctcctgatcagcagagactgatctttgctggcaagcagctggaagatggacgtactttgtctgactacaatattcaaaaggagtctactcttcatcttgtgttgagacttcgtggtggtgctaagaaaaggaagaagaagtcttacaccactcccaagaagaataagcacaagagaaagaaggttaagctggctgtcctgaaatattataaggtggatgagaatggcaaaattagtcgccttcgtcgagagtgcccttctgatgaatgtggtgctggggtgtttatggcaagtcactttgacagacattattgtggcaaatgttgtctgacttactgtttcaacaaaccagaagacaagtaactgtatgagttaataaaagacatgaactaacatttattgttgggttttattgcagtaaaaagaatggtttttaagcaccaaattgatggtcacaccatttccttttagtagtgctactgctatcgctgtgtgaatgttgcctctggggattatgtgacccagtggttctgtatacctgccaggtgccaaccacttgtaaaggtcttgatattttcaattcttagactacctatactttggcagaagttatatttaatgtaagttgtctaaatataa

SEQ ID NO: 723 - DNA, 382 bp, Homo sapiens
ctctccgccagaccgccgccgcgccgccatcatggacaccagccgtgtgcagcctatcaagctggccagggtcaccaaggtcctgggcaggaccggttctcagggacagtgcacgcaggtgcgcgtggaattcatggacgacacgagccgatccatcatccgcaatgtaaaaggccccgtgcgcgagggcgacgtgctcacccttttggagtcagagcgagaagcccggaggttgcgctgagcttggctgctcgctgggtcttggatgtcgggttcgaccacttggccgatgggaatggtctgtcacagtctgctccttttttttgtccgccacacgtaactgagatgctcctttaaataaagcgtttgtgtttcaagttaa

SEQ ID NO: 724 - DNA, 340 bp, Homo sapiens
ctcaaaaatttgaagagcgcatgcgtgggccagcttcttccttttacctcgttgcactgctgagagcaagatgggtcaccagcagctgtactggagccacccgcgaaaattcggccagggttctcgctcttgtcgtgtctgttcaaaccggcacggtctgatccggaaatatggcctcaatatgtgccgccagtgtttccgtcagtacgcgaaggatatcggtttcattaagttggactaaatgctcttccttcagaggattatccggggcatctactcaatgaaaaaccatgataattctttgtatataaaataaacatttgaaaaaacccttcaaaaa

SEQ ID NO: 725 - DNA, 120 bp, Artificial Sequence
  Description of Artificial Sequence: Synthetic polynucleotide
gagctgcgcggtgaggaagaccatggcgcctgcaggccggcgtcccgaacactcaacaacgcacgcgcagcgccgctgccatcttgcccgggtcggaaatggtggtcacgagcgcttccg

SEQ ID NO: 726 - DNA, 120 bp, Artificial Sequence
  Description of Artificial Sequence: Synthetic polynucleotide
ccgccaacctgtagcagcgatttttccttccccggaagtgcctggcgtgcttcagcacctcctggatccgaaagtagcggtcggtgacgcgattccgcagccagagctgcgcggtgagga

SEQ ID NO: 727 - DNA, 120 bp, Artificial Sequence
  Description of Artificial Sequence: Synthetic polynucleotide
ctggctagcagctgtaattcgattaatccagagggtcctcatgttctttttcttcaggtatcgggctttggtgcatttcacaaaggctcgaatcacggttctgaccgccaacctgtagca

SEQ ID NO: 728 - DNA, 120 bp, Artificial Sequence
  Description of Artificial Sequence: Synthetic polynucleotide
tctttggctcgtagatggccagatccgctaggactttcctgttgagctccacctggcacttaactaaattcccaatgagcgctggatacttcagtccatgttcctggctagcagctgtaa

SEQ ID NO: 729 - DNA, 120 bp, Artificial Sequence
  Description of Artificial Sequence: Synthetic polynucleotide
accactctggaaaaaatgccttcaggttccttcccatcccccaaggcagcagcaaatccttcgtgtcgcctcctactggccaaggcagccaaagatttgaaagtctttggctcgtagatg

SEQ ID NO: 730 - DNA, 120 bp, Artificial Sequence
  Description of Artificial Sequence: Synthetic polynucleotide
gtctgttattgggttgtagataaacaaaagtataaatcaaacaaactgcaaattactctgtctcttttcctaatcaatacagcaacagtcctcagtggtactgcaccactctggaaaaaa

SEQ ID NO: 731 - DNA, 120 bp, Artificial Sequence
  Description of Artificial Sequence: Synthetic polynucleotide
ttttttttgactctaaaaactgaagagtgtttgagtttcattcacacaaaacatggacatcatctgtgaggctctgtcccagagagacagggccatccctcatgtctgttattgggttgt

SEQ ID NO: 732 - DNA, 120 bp, Artificial Sequence
  Description of Artificial Sequence: Synthetic polynucleotide
ggaccggagaccccacacgagctccaagcggccccggctccggcgccaacccggcctcgaccttgctccgcttccgaccgctgcgtcgcagcaagagcggctccgattggccgcggccgc

SEQ ID NO: 733 - DNA, 120 bp, Artificial Sequence
  Description of Artificial Sequence: Synthetic polynucleotide
gctgcgcgggccccgcttgctcgtccacttgctcattcggtccgcaccccggaccaggcagcgcgccgctgcggccaggacgcccatgccgcgccctggaccggagaccccacacgagct

SEQ ID NO: 734 - DNA, 120 bp, Artificial Sequence
  Description of Artificial Sequence: Synthetic polynucleotide
cgacgaactccgggaccatctccttgatctgcacgaacctccagcccgaggtgaggaagccgatgcccttggcgccccggcccttgcggcccctgaagctgcgcgggccccgcttgctcg

SEQ ID NO: 735 - DNA, 120 bp, Artificial Sequence
  Description of Artificial Sequence: Synthetic polynucleotide
ttcgctgaagagctgcgcggccgtcaggggcgtctcctcgctctcaggggcgaggtagctcacgtagggcttgagcttgaagccggtcagatccgggacgacgaactccgggaccatctc

SEQ ID NO: 736 - DNA, 120 bp, Artificial Sequence
  Description of Artificial Sequence: Synthetic polynucleotide
gctttccctcctgtgtgggctcgaagccgtacttttccaggttgtcagggtcgaaggtaccgtccttgaagtccttttcgatggcaggcgccacggcttcgctgaagagctgcgcggccg

SEQ ID NO: 737 - DNA, 120 bp, Artificial Sequence
  Description of Artificial Sequence: Synthetic polynucleotide
tttagctggcaaaggcgtttaatagaaatgagatgagggcaggccgcccctcccccgcccagctagcgcaggaagttcctggggtagagctggaagagctttccctcctgtgtgggctcg

SEQ ID NO: 738 - DNA, 120 bp, Artificial Sequence
  Description of Artificial Sequence: Synthetic polynucleotide
ccgagaccagctggtcgctgccgggcccgctagtagcccacggagaagccgcccacagccggacaccagagccttgagggccgccatcttcaaaaacctaccctgacctctcgtccattt

SEQ ID NO: 739 - DNA, 120 bp, Artificial Sequence
  Description of Artificial Sequence: Synthetic polynucleotide
tggccagaggggttaggaggatttggactctccttgggagtcgctgtgatacggccttcaattatagttgtcttcccttcttgggtctccaccacttccctgaacccgcgagctggaagc

SEQ ID NO: 740 - DNA, 120 bp, Artificial Sequence
  Description of Artificial Sequence: Synthetic polynucleotide
ggcataggcctgtgatctttcggggcagcatgcctccatgaggccggatgaactggctaagcagcagaacatcgtcatagttatacttgtgcttcaggttccaacggcagatggggcact

SEQ ID NO: 741 - DNA, 120 bp, Artificial Sequence
  Description of Artificial Sequence: Synthetic polynucleotide
gttgagttggggtttgctcttcggaacaactccttcaggaagccgaggcctgtgatttggtaatagacctgctcggtgggccatcttcacacactcctcgatcttgcggtgttcttcctg

SEQ ID NO: 742 - DNA, 120 bp, Artificial Sequence
  Description of Artificial Sequence: Synthetic polynucleotide
gagtagcagacattgtccctcagaaggggtgaccccacgggcatgcgcaccctgttccagcgggggccttttttgtagatgggcttgacggagccaggagcccagcgcgtcaggtaccgg

SEQ ID NO: 743 - DNA, 120 bp, Artificial Sequence
  Description of Artificial Sequence: Synthetic polynucleotide
acaggagtatagttgtggccaagggcttgtgagtgggcctcctactccccagcacaggtgcaggaggaactctggaagcactgctctctgtcagtgatacagcttccaaggtgttcttga

SEQ ID NO: 744 - DNA, 120 bp, Artificial Sequence
  Description of Artificial Sequence: Synthetic polynucleotide
ctgccctgcctgcctctagctcccagcattgctactgtgcaggccaagggtactgaagttagtcccactgtcccctgtccatgcatgttggagggaccaggccatcgtggtggggtggga

SEQ ID NO: 745 - DNA, 120 bp, Artificial Sequence
  Description of Artificial Sequence: Synthetic polynucleotide
gtgagcgcacacccaatgggtaagcccatgaacccagtttatgacactgcgttgggcaaaactcctgtccccagcactgagcatggcctaagccccatagcagctggcaagggacccaac

SEQ ID NO: 746 - DNA, 120 bp, Artificial Sequence
  Description of Artificial Sequence: Synthetic polynucleotide
atgggacctgtttggcccatgaattcaattgactcattggccccatcacaagagatcagtgactcaatgctcagcacccagctggcaatgtgcccaggaccccctgcacttcccaagcag

SEQ ID NO: 747 - DNA, 120 bp, Artificial Sequence
  Description of Artificial Sequence: Synthetic polynucleotide
tgcccctttgaggaacgcagtttcttggattcacacgagagcggcaagtgtgtcaggcagcccaccttggctccctgcagctctcccacagtaaggagctcacagctgtcatgaagagga

SEQ ID NO: 748 - DNA, 120 bp, Artificial Sequence
  Description of Artificial Sequence: Synthetic polynucleotide
tctcactttagccttcggaatgctttcgaaactgtaggtttaagcaacgtaaaagatgttttaaaaaggcttttcccgtacaatcaacgtggctaagagaatttttaaaaggaggtcgag

SEQ ID NO: 749 - DNA, 120 bp, Artificial Sequence
  Description of Artificial Sequence: Synthetic polynucleotide
gaaggacccaccccttaggcgaccacaccaaatgcctgactgccgtcccagcgacaatccaacccggtgccagactaggacgtgaacttcgtttctcctctccctagcctgggcttattt

SEQ ID NO: 750 - DNA, 120 bp, Artificial Sequence
  Description of Artificial Sequence: Synthetic polynucleotide
ggtcttccccgtaagggttttcacgaaaatctgcattttggtggcggctccaccgcagatggcggatcgaaaaggaagaacgccgcgcaggcccacggggtttcccggagctcccgccga

SEQ ID NO: 751 - DNA, 120 bp, Artificial Sequence
  Description of Artificial Sequence: Synthetic polynucleotide
cttccagctgcttgccagcaaagatcagtctctgctgatcaggaggaattccttccttatcctggatcttggcctttacattttctatcgtatccgagggttcaacctcgagggtgatgg

SEQ ID NO: 752 - DNA, 120 bp, Artificial Sequence
  Description of Artificial Sequence: Synthetic polynucleotide
attcttcttgggagtggtgtaagacttcttcttccttttcttagcaccaccacgaagtctcaacacaagatgaagagtagactccttttgaatattgtagtcagacaaagtacgtccatc

SEQ ID NO: 753 - DNA, 120 bp, Artificial Sequence
  Description of Artificial Sequence: Synthetic polynucleotide
aacaccccagcaccacattcatcagaagggcactctcgacgaaggcgactaattttgccattctcatccaccttataatatttcaggacagccagcttaaccttctttctcttgtgctta

SEQ ID NO: 754 - DNA, 120 bp, Artificial Sequence
  Description of Artificial Sequence: Synthetic polynucleotide
caataaatgttagttcatgtcttttattaactcatacagttacttgtcttctggtttgttgaaacagtaagtcagacaacatttgccacaataatgtctgtcaaagtgacttgccataaa

SEQ ID NO: 755 - DNA, 120 bp, Artificial Sequence
  Description of Artificial Sequence: Synthetic polynucleotide
tcacataatccccagaggcaacattcacacagcgatagcagtagcactactaaaaggaaatggtgtgaccatcaatttggtgcttaaaaaccattctttttactgcaataaaacccaaca

SEQ ID NO: 756 - DNA, 120 bp, Artificial Sequence
  Description of Artificial Sequence: Synthetic polynucleotide
ttatatttagacaacttacattaaatataacttctgccaaagtataggtagtctaagaattgaaaatatcaagacctttacaagtggttggcacctggcaggtatacagaaccactgggt

SEQ ID NO: 757 - DNA, 120 bp, Artificial Sequence
  Description of Artificial Sequence: Synthetic polynucleotide
aggaacttgcggcgcttgcgctggttcccgtgcaggacttcccgcaccgcctcgtacagggtgtcgcgagagactttgctgctcatggcttctcacgccgcgctaaccggaaaagagact

SEQ ID NO: 758 - DNA, 120 bp, Artificial Sequence
  Description of Artificial Sequence: Synthetic polynucleotide
cccaggacacacacagagaacttagggcggggagtggacttaagcctgacggtgcccgagaagcgcttgtccttctggggatcatagttcttcaagctgatctgcaactccaccgtctcc

SEQ ID NO: 759 - DNA, 120 bp, Artificial Sequence
  Description of Artificial Sequence: Synthetic polynucleotide
gcatcatacttcttggccagcttcttgaccagttttttattcttgttgagttttttcagcgcctcgatgtccatgtgggggatatccacggccttagcctcgtcacagtgctgctggtcc

SEQ ID NO: 760 - DNA, 120 bp, Artificial Sequence
  Description of Artificial Sequence: Synthetic polynucleotide
ccactttggccaccatgttttcgttgtgtgtgagcagggaagggaactttcctgccttatttaaacctgggccgaggattcgtggaatctgcttgatcagagactctgaggccaaaaacg

SEQ ID NO: 761 - DNA, 120 bp, Artificial Sequence
  Description of Artificial Sequence: Synthetic polynucleotide
agttgacagccaggtgaatgttatacacaagctcatcgtctgtcatcttcacgtgaccaacagctacagccagacataacaccttcttcatttggaacttgattgtggacttcacctcat

SEQ ID NO: 762 - DNA, 120 bp, Artificial Sequence
  Description of Artificial Sequence: Synthetic polynucleotide
gaactggtaatagaatttattcaaatgtgccttaatataggcgctggggcttgcccatggtgctcttgatatataaggcccggacattctgccagtttttcttgagcaatgacaccaaga

SEQ ID NO: 763 - DNA, 120 bp, Artificial Sequence
  Description of Artificial Sequence: Synthetic polynucleotide
ataggcggtctgtctgcgcgcgtaagaaccatagagtcctgtcgaagacgggtggacgctctgtcagacgtcatgaccatagacgcagccgctcttggcgcttgcgcccgggcgtagccc

SEQ ID NO: 764 - DNA, 120 bp, Artificial Sequence
  Description of Artificial Sequence: Synthetic polynucleotide
cggcttgttcttacaataccggtaacaacgggcggggcggcggcccatggcgacaccaggatcttcagtggcacaccgaagggaaagaggcgctcctccgcctgcgcatggcttatatag

SEQ ID NO: 765 - DNA, 120 bp, Artificial Sequence
  Description of Artificial Sequence: Synthetic polynucleotide
tctgacaccatgtggccacaaagcggaaactcatccacttttgcctttttccgccccaggtcaaaaatgcgaatcttggcatcagggacacctcggcagaagcgagactttgggtacggc

SEQ ID NO: 766 - DNA, 120 bp, Artificial Sequence
  Description of Artificial Sequence: Synthetic polynucleotide
ggggtggagccgcacccggatatggaagccatctttgccacaactttttaccatgtacttattggcacaaattcgggcagcctccagggcttcagaggacagctgctcatattcatctga

SEQ ID NO: 767 - DNA, 120 bp, Artificial Sequence
  Description of Artificial Sequence: Synthetic polynucleotide
ccaatgtgaaccctggccacagtgccctggggctttccaaaggcacctcgcatgcctgtttggagcctgtcagccccagcacaggacaacatcttgttgatgcggatgacgtggaagggg

SEQ ID NO: 768 - DNA, 120 bp, Artificial Sequence
  Description of Artificial Sequence: Synthetic polynucleotide
acttctttgagatgtggatcttctggcggccaggaaacttgaacttggccctgcgcagggcctcaatcacatgctccttgttctgcagcttggtgcggatggacatgataacttggccaa

SEQ ID NO: 769 - DNA, 120 bp, Artificial Sequence
  Description of Artificial Sequence: Synthetic polynucleotide
ccacttgtccagagggccacgattggggatgtacttgaccccacagccatctgggatgagccgcttttcagccaccatgtcttcaaattcatcagcattgaacttggtgaagccccactt

SEQ ID NO: 770 - DNA, 120 bp, Artificial Sequence
  Description of Artificial Sequence: Synthetic polynucleotide
gttccttccccgtcaagaatgtagatacaaagacataggtggacaggaagtagaatttattggtgagtattaagaggggggcagcacattggaagccctcatgagtgcagggcccgccac

SEQ ID NO: 771 - DNA, 120 bp, Artificial Sequence
  Description of Artificial Sequence: Synthetic polynucleotide
tgacataaggccaccagtcccagccctttgcagggtttgctgcctcatgagcagggctgagttgtcaacctgtttctgaagtgaaagggcaatgacccaaaggttcccagaggaagttcc

SEQ ID NO: 772 - DNA, 120 bp, Artificial Sequence
  Description of Artificial Sequence: Synthetic polynucleotide
ccagcctgggattgcaaggctttgctgcagctgtgcttcatgaaaagcacttcagtgtttttcaacctactgcctaggacctggggaggtccaagtcaagctccagagtagacaactgac

SEQ ID NO: 773 - DNA, 120 bp, Artificial Sequence
  Description of Artificial Sequence: Synthetic polynucleotide
agcccaatgtgatgcacacctacccttgctaaataaacgctgctggtcagcctctagcccacaagcccctcttggtccgcatgtgttgtaataagcaacacaactgtaggctgaccccag

SEQ ID NO: 774 - DNA, 120 bp, Artificial Sequence
  Description of Artificial Sequence: Synthetic polynucleotide
ggcatggggcccaggaggttgctagagataggaaatggggcaaatcgcaggtgacctcagcagtacctggatgattcccaccaaggaggaatggccaaaccagatgggtgagaacaagcc

SEQ ID NO: 775 - DNA, 120 bp, Artificial Sequence
  Description of Artificial Sequence: Synthetic polynucleotide
aaaccatgccacacacgtgtctgttccgaggtcttgttacaaatgaccaaaggttagcctagacctttggtcaggtggtgaaggccctgggaatgcaggttctagaaggggtgggggcat

SEQ ID NO: 776 - DNA, 120 bp, Artificial Sequence
  Description of Artificial Sequence: Synthetic polynucleotide
tccctggatacagatgctcaggccacccacctagcactcctctcatttttgctgctcccccaaaagccagcgctgttctacaatagttcaggtcagacatctaagatccccaggccaaac

SEQ ID NO: 777 - DNA, 120 bp, Artificial Sequence
  Description of Artificial Sequence: Synthetic polynucleotide
cctaagaaatggctgtaaactgagattacaaaaaaccagaggccttttgggagccacaggctgggggctggggccaacataccccagctctgggaccaaaagcctttggagtcctgtccc

SEQ ID NO: 778 - DNA, 120 bp, Artificial Sequence
  Description of Artificial Sequence: Synthetic polynucleotide
gggtcatgtgttaactataatcacatttatggtttggaaccatcaccccaaggtaaaaaaaaaataaaaggtattcccaggtatgtttggcaaaataaaataaaggtaattaaaaaccta

SEQ ID NO: 779 - DNA, 120 bp, Artificial Sequence
  Description of Artificial Sequence: Synthetic polynucleotide
gtcccggaaaggggctgcaggacacagcaaaatgccagcagcgtgccggacccctcccttccatcctcctctccaaagaacagaggtcaggaaaaacactggctgggacgctagaagggt

SEQ ID NO: 780 - DNA, 120 bp, Artificial Sequence
  Description of Artificial Sequence: Synthetic polynucleotide
gttggtacaggcttctgcatgcctggtaaagtccagccaaggctggtcaaggcaacatctccacacagaaaatctgcaccagttatgtaagctaaaaagctgtgtgaacccaggtgtccc

SEQ ID NO: 781 - DNA, 120 bp, Artificial Sequence
  Description of Artificial Sequence: Synthetic polynucleotide
gaaaccagcaaacaccgggaaacattttggctcattataatccggtgaacaatgcagtcaggcctgttataaccgctgagcagccacactcgcacctcctgggtgctgtagtctgtgttg

SEQ ID NO: 782 - DNA, 120 bp, Artificial Sequence
  Description of Artificial Sequence: Synthetic polynucleotide
ttgcagatatgccaatgggccatgtttattgtggattggtaagaatcaccaggaaaccattaagccccaatagctacaaggagggtggttaatctgctatatcaaactccttccctgaaa

SEQ ID NO: 783 - DNA, 120 bp, Artificial Sequence
  Description of Artificial Sequence: Synthetic polynucleotide
acagatgttgagacagagtttgcggatgcgaagttcccgcatggggttctccttttcaccttgatcctgcgccatgatggagagcaggaagagaaagcggagcttccggccgagggcctt

SEQ ID NO: 784 - DNA, 120 bp, Artificial Sequence
  Description of Artificial Sequence: Synthetic polynucleotide
aggatctgacagtgtatctagctttggaaaacacaggggtctgccctgtgagctgctccaacaccttggctgctcgcgtcagtctgtctccactctccccaacacagatgttgagacaga

SEQ ID NO: 785 - DNA, 120 bp, Artificial Sequence
  Description of Artificial Sequence: Synthetic polynucleotide
taactcatactcccgcacctttagacccttctccaagatttcttctgccttggcccctcgaactgtgcagtggacagcaatcttttcatttctccggatgccaaaggatctgacagtgta

SEQ ID NO: 786 - DNA, 120 bp, Artificial Sequence
  Description of Artificial Sequence: Synthetic polynucleotide
ccaggccgtagataccaatgcttgggtcatatttgatacccagatcgatgtgttcctggatcccaaaaccaaagtttccagtatctgagaagttgttttttcttaactcatactcccgca

SEQ ID NO: 787 - DNA, 120 bp, Artificial Sequence
  Description of Artificial Sequence: Synthetic polynucleotide
catggcctcctctttgctgattctgtgtttggccccaatgcagcctgtcctgcgcttcttgtctgcgatgctgaaacctggcctacccagcaccacatagaagtccaggccgtagatacc

SEQ ID NO: 788 - DNA, 120 bp, Artificial Sequence
  Description of Artificial Sequence: Synthetic polynucleotide
tttttgcacatttcactgaaaactttttattgctcttttggatagaaacgggaatttatttgccaggaaggatgatcccatcatacttctgctggaaccagcgcatggcctcctctttgc

SEQ ID NO: 789 - DNA, 120 bp, Artificial Sequence
  Description of Artificial Sequence: Synthetic polynucleotide
ggcatggtggaggcggctggtgtcggatgaacccggattcgggacgaccgaaggaagttgcaccttggcctcctccgagccgaaagccgagaggccggaaatcgcgcggacaagccagat

SEQ ID NO: 790 - DNA, 120 bp, Artificial Sequence
  Description of Artificial Sequence: Synthetic polynucleotide
gacagacccagggggccgatcttgggggccagggcagaagtggcaccgacttcacctccggtgcacctcaggtatacgactttgatctcgttggggtcgaacttcggcggcatggtggag

SEQ ID NO: 791 - DNA, 120 bp, Artificial Sequence
  Description of Artificial Sequence: Synthetic polynucleotide
accacctcaatctgggcctgtctgttctgaatggtcagtttcactgtaatcctcaggcccttccagtcacccgttgccttggcaatgtcatcaccaactttttttggagacagacccagg

SEQ ID NO: 792 - DNA, 120 bp, Artificial Sequence
  Description of Artificial Sequence: Synthetic polynucleotide
acaatctcatcaaaagtgatattcccactgtgtttaatgtttttctgtttctttctgtctcttggtggttccttgagggctttgatgatcagggcagaggcagaaggcaccacctcaatc

SEQ ID NO: 793 - DNA, 120 bp, Artificial Sequence
  Description of Artificial Sequence: Synthetic polynucleotide
cggccatcaacattacagcccactgactgggcagtccccaggatctctttaatggttccagagagttctctggctaaggatcggtgccgcatctgtcgagcaatgttgacaatctcatca

SEQ ID NO: 794 - DNA, 120 bp, Artificial Sequence
  Description of Artificial Sequence: Synthetic polynucleotide
tccaccagttgtcaaatgatcctttattgaaatgttttcctttgtgcttaactggctgggcattccacagcaccactgttgatgtcatcgatgatgtcatgaggatggcggccatcaaca

SEQ ID NO: 795 - DNA, 120 bp, Artificial Sequence
  Description of Artificial Sequence: Synthetic polynucleotide
agatggcctcgaccatcaagcaccaggacctgcacctccgccatcttcggcagccgcttggaaaaggaggaggttttgtcgcagggtttcttatcccttgaaacaggggcggcagaagtg

SEQ ID NO: 796 - DNA, 120 bp, Artificial Sequence
  Description of Artificial Sequence: Synthetic polynucleotide
gtacttcaacttgtttctgtagaaattgccagaaatgttgatgccttcacagcgtacgaccaccaccttccggcccagcagtacctgtttagccacgatggccgccaggcggcccaggag

SEQ ID NO: 797 - DNA, 120 bp, Artificial Sequence
  Description of Artificial Sequence: Synthetic polynucleotide
gcttggttttgtggggcagcatacctcgcacggtccgccagaagatgcggctgggggcccggaagtggtaggggcctcgggaagggttggtgttcatccgcttgcggaggaaagccaggt

SEQ ID NO: 798 - DNA, 120 bp, Artificial Sequence
  Description of Artificial Sequence: Synthetic polynucleotide
ttgtaggcttcagacgcacgaccttgagggcagcaggaaccaccatccgctttttcttgtcgtagggcggtgggatgccgtcaaacaccttgagacggtccagagcggcctggcctcgct

SEQ ID NO: 799 - DNA, 120 bp, Artificial Sequence
  Description of Artificial Sequence: Synthetic polynucleotide
ttcttcttccggtagtggatcttggctttctctttcctcttctcctccagggtggctgtcactgcctggtacttccagccaacctcgtgagccaggcgccccagataggcaaactttctt

SEQ ID NO: 800 - DNA, 120 bp, Artificial Sequence
  Description of Artificial Sequence: Synthetic polynucleotide
aattaacagtctttattgggctcagaccaggagtccgtgggtcttgaggacctctgtgtatttgtcaattttcttctccacgttcttctcggcctgtttccgtagcctcatgagctgttt

SEQ ID NO: 801 - DNA, 120 bp, Artificial Sequence
  Description of Artificial Sequence: Synthetic polynucleotide
ctttccttgctcccagcttcctatgtcccagggctgcctgtggcacctggactgctgctgcccctgggtcccgtacattccagggcaacaatggaggaagggcaggcaacgcatgaggaa

SEQ ID NO: 802 - DNA, 120 bp, Artificial Sequence
  Description of Artificial Sequence: Synthetic polynucleotide
ttctggctccctttcactcatagtaactggttgctcttcctattggtcatagataaatgacacctgcacaattctccgagtgctttcaagcaacttcgggaggcagtgactaagaccctt

SEQ ID NO: 803 - DNA, 120 bp, Artificial Sequence
  Description of Artificial Sequence: Synthetic polynucleotide
acaacagcaagctcatgctgtccccaagtgcttgcacattctaacagctgcagagtatatgaccaggtggaaagtccaacagatgccccactcacaagatagggccctccaatcagtctt

SEQ ID NO: 804 - DNA, 120 bp, Artificial Sequence
  Description of Artificial Sequence: Synthetic polynucleotide
ttctttaaaagcaatttatttctgattacaaaatacaggtgaggagcatgggcgatgcctgtaaccccttggttgtgcatcttcccagtctatttctgcttctagaaataccctgtgtac

SEQ ID NO: 805 - DNA, 120 bp, Artificial Sequence
  Description of Artificial Sequence: Synthetic polynucleotide
gggcagcggccgaacgctgtctgcgaagaagaaggggcccatccactcccgcgttggctgaagcgccaggccgatggcgctggatgatgcccaaaggccaggacccagtctccctcacct

SEQ ID NO: 806 - DNA, 120 bp, Artificial Sequence
  Description of Artificial Sequence: Synthetic polynucleotide
cggccctgcggctgcggacgagaggggagcgagtgagaggccggaccccgggcgcgcgcacccccccgggcctccgccccgaaccctccagactgggccgtccggccgcgcctagagccc

SEQ ID NO: 807 - DNA, 120 bp, Artificial Sequence
  Description of Artificial Sequence: Synthetic polynucleotide
cttacgtctgcggatcttacgggccggctggttgaaccacgtggccacgcgccgctgccagtccttgtggaagtggggcttcaagaccatgccattccggctgggcgccatggctgccta

SEQ ID NO: 808 - DNA, 120 bp, Artificial Sequence
  Description of Artificial Sequence: Synthetic polynucleotide
ctgaagccgcggccggcgcgcaccttcgtgtggtaccgaaccgtggggcagcgcacgatgggccggatgggacccgacgcggggcgcggggcgatgcggcgcgccttggcttgccgggcc

SEQ ID NO: 809 - DNA, 120 bp, Artificial Sequence
  Description of Artificial Sequence: Synthetic polynucleotide
agccgctgcacgttggcctgcagggactccgtggacttgttccgcctcctcggatccacagaaatgccgatggtccgggccaccttcttgtgaatgccggccaccctgagctcctccagg

SEQ ID NO: 810 - DNA, 120 bp, Artificial Sequence
  Description of Artificial Sequence: Synthetic polynucleotide
acgggcatgaccggtccggtcagctgggtggccagtttcagttcttcagcagaactgtctcccttcttgggggccgagggcttcctggggaagaggatgagtttggagcggtactccttc

SEQ ID NO: 811 - DNA, 120 bp, Artificial Sequence
  Description of Artificial Sequence: Synthetic polynucleotide
tttgcccgtatgccgaagagccgggcgttggcacgggccatacggagactagcgaaggctttgaaattcttctcttcctcagtgatgactcgagctttctccttcttatagacgttccgg

SEQ ID NO: 812 - DNA, 120 bp, Artificial Sequence
  Description of Artificial Sequence: Synthetic polynucleotide
cagttgttcccacgaaacacaccacgtggagacccagcatgactgccgactgattccaagtccccaggagggctttattttttcttttcaacatcctgttctgcggcttccttggctctt

SEQ ID NO: 813 - DNA, 120 bp, Artificial Sequence
  Description of Artificial Sequence: Synthetic polynucleotide
caaccaacagtgcttcaacacagaaagtaaagcattatccagggcttggactgtctttcaagaaagccccaaatcccctggcaggaggaagtcacagcagtgaagccccatcccaggccc

SEQ ID NO: 814 - DNA, 120 bp, Artificial Sequence
  Description of Artificial Sequence: Synthetic polynucleotide
tacagctgtgagcaccagcccaaccttgcctctttaaaaagaaaaaacacaagtccactctgaagtcagcctctgtaacctccccacaagaaaaccgttttacatcagtcactaaccaaa

SEQ ID NO: 815 - DNA, 120 bp, Artificial Sequence
  Description of Artificial Sequence: Synthetic polynucleotide
cccaggagctgcaactacaagtgtgcagcaccaagcatggctgatttctttatttttagtagttctgacatgttggccaggctggtcttgaactcccagccaacctcaaagtgctgggat

SEQ ID NO: 816 - DNA, 120 bp, Artificial Sequence
  Description of Artificial Sequence: Synthetic polynucleotide
ccctgtctctttttttttttttgagacagtctcactgttgcccaggctagagtgcagtggcgtgatcctggctcagtgcagcctctgcctcctgggttaagtgatccctcacctctgcct

SEQ ID NO: 817 - DNA, 120 bp, Artificial Sequence
  Description of Artificial Sequence: Synthetic polynucleotide
ggtctcgtgcctataaacccctctacttgggaggctgagggaggactgcttgaggccatgagttcaagactgcagtgagccatgattgtggcactgtactccagcctgggtgccgaagac

SEQ ID NO: 818 - DNA, 120 bp, Artificial Sequence
  Description of Artificial Sequence: Synthetic polynucleotide
agagcaagaggaccatggttaccgggcacaacaagcttaagaatgacgccccaaagtccaagatgctacattaactagaaactgctttgcttaaaaaaggcaactctaggttgggtgcag

SEQ ID NO: 819 - DNA, 120 bp, Artificial Sequence
  Description of Artificial Sequence: Synthetic polynucleotide
ccatgaagcaagaacaatggctttagaatgtttttgtttaacaggagaggccgacacttggcagggccatctcataccttggtgtctgggtgaagaagcccattgaaggaagggttaatc

SEQ ID NO: 820 - DNA, 120 bp, Artificial Sequence
  Description of Artificial Sequence: Synthetic polynucleotide
ggactagggcaggctgtgtctgagcactgcacgagaaaccatgctgccctcggacacagaagacatggggatgccagctcagaccagggcaccctggcactctctctggctgcctcttgt

SEQ ID NO: 821 - DNA, 120 bp, Artificial Sequence
  Description of Artificial Sequence: Synthetic polynucleotide
taccggcacccggcagaggcatgtagacaaaacagaatctgactcggtccctgaagctgcttctctggggttgtcatggccatagctgccaaggagagcaggtgctgctgtgagctggta

SEQ ID NO: 822 - DNA, 120 bp, Artificial Sequence
  Description of Artificial Sequence: Synthetic polynucleotide
gtttagatgtttccaaacaagcaaggtgtcatcgtgtatcaagtgtggctgtgagtgcagcagcagaggtagcagcatcacctatttccacgccagtaacagctccctgggtgcctcaat

SEQ ID NO: 823 - DNA, 120 bp, Artificial Sequence
  Description of Artificial Sequence: Synthetic polynucleotide
ccggcccaccttaactttacataggacaagagtcccaaacatacaaactgatcacgaagttaacatatacacctcagacaggaaactggtagccaacagcctgcaagtcatctactagat

SEQ ID NO: 824 - DNA, 120 bp, Artificial Sequence
  Description of Artificial Sequence: Synthetic polynucleotide
acaggcgtgtgtcaccactcagctaatttttgtattttcagtagagatgaggtttcaccatcaggtgatccacccgcctcggcctcccagtgttaggattacaggcgtgagccactgcac

SEQ ID NO: 825 - DNA, 120 bp, Artificial Sequence
  Description of Artificial Sequence: Synthetic polynucleotide
accttgtacaactttttttgagactgagtctcgctgtcacccaggctggagcacagtggtgcagctcggctcactgcaatctctgcctcctgggttcaagcctaccaagtagctgggatt

SEQ ID NO: 826 - DNA, 120 bp, Artificial Sequence
  Description of Artificial Sequence: Synthetic polynucleotide
agcgctggagacccctgcaccccccacggccagtcttcagccaggttggaatccaccagaaatcttcaggccctctcacgtgagagggattcgagcctaggctcaagcttccaaccatcc

SEQ ID NO: 827 - DNA, 120 bp, Artificial Sequence
  Description of Artificial Sequence: Synthetic polynucleotide
cctctgctccattcacgtcaccacatggcattacctactccaggtgcggccccgcaggcagcaggaaaggcccttcccctagtgcggtgtgggcagggaggaagcaggctggagggcaga

SEQ ID NO: 828 - DNA, 120 bp, Artificial Sequence
  Description of Artificial Sequence: Synthetic polynucleotide
agatgatacctgaaccctgacttcccgtcaagtcggctggtaggagggcccccggaacacgcagatcagagtgcttttgtcccacagtaaaaacagcaaggcggtgtgatggggcacaga

SEQ ID NO: 829 - DNA, 120 bp, Artificial Sequence
  Description of Artificial Sequence: Synthetic polynucleotide
tagattaagcaaacggagagaacgtaaggttagcaacacagccctggagactgtgactttcagtgaaatgaggaggggactctggcaggttcagtgcagactaccccgccccaggtgcac

SEQ ID NO: 830 - DNA, 120 bp, Artificial Sequence
  Description of Artificial Sequence: Synthetic polynucleotide
ctcaccaaactcacaatgtcccagcgcaacctagaaaaatgacctcttgctaagagcaccggccaacagcagggccccagacaacagagaaagcccatcctctcctgttagggctcttaa

SEQ ID NO: 831 - DNA, 120 bp, Artificial Sequence
  Description of Artificial Sequence: Synthetic polynucleotide
gcagaagccttcctcagccccaggaagggcagagccgcactagctgcatttcaggtaggggagcagcaggcagcaggcagcccggcccagcccagcccagcccagcccacatccatgacc

SEQ ID NO: 832 - DNA, 120 bp, Artificial Sequence
  Description of Artificial Sequence: Synthetic polynucleotide
agagtctttcttggagcagacaggcccgtacctggatcaggagatcttgctccagctacaaggactgagtgtcagcagggaggctgcctcacccacctgcccagccccccagctatcctg

SEQ ID NO: 833 - DNA, 120 bp, Artificial Sequence
  Description of Artificial Sequence: Synthetic polynucleotide
gggcacggcccacactcaggcacttgtccccaccagcggggtatcctgggccgacaggtgctgaatcaggcggtccccagggactaagttaaaacaaagggcccctttgcatctggtggc

SEQ ID NO: 834 - DNA, 120 bp, Artificial Sequence
  Description of Artificial Sequence: Synthetic polynucleotide
cctggcacagagggctggttccagcccgggttccacagcgccccctaggtcaggcccacacatcacaactgaaaagccacttcctagtcaggacggccccactcagggatggccacactc

SEQ ID NO: 835 - DNA, 120 bp, Artificial Sequence
  Description of Artificial Sequence: Synthetic polynucleotide
acgaaatcaaggtgttcccagagccgctttgcctgaggtgcggtgggggcccttcctctcagctcccagtgacccacgccatggcagctgcccctcagggccggcggaacctgtctgcgg

SEQ ID NO: 836 - DNA, 120 bp, Artificial Sequence
  Description of Artificial Sequence: Synthetic polynucleotide
tgaggagcctgggcgcacctgcacttcctccaccgggcagcagaccacaagctcgtggcacacaggtcagtttctcaggcttcacagcttggctgccctccctgggacggctcacatgga

SEQ ID NO: 837 - DNA, 120 bp, Artificial Sequence
  Description of Artificial Sequence: Synthetic polynucleotide
tgccgtaaaaccaacgcttctacaaaaggccacgggcaccacagagccagcccgtgctccccgggggcgacaggctgaataggaaatgctcacaccccgaaggaatcctgcaaaacggaa

SEQ ID NO: 838 - DNA, 120 bp, Artificial Sequence
  Description of Artificial Sequence: Synthetic polynucleotide
gcctcctgagactatccccgatcagttctgcaggcgccggagcgcgcctggccccatgacccccgtgggcactgctggcaaagccccacccactgtgggaggctgccccagagatgaacc

SEQ ID NO: 839 - DNA, 120 bp, Artificial Sequence
  Description of Artificial Sequence: Synthetic polynucleotide
gtgagaaacggtgcatcaccgaggcaggcgactcgtgcctcctgagactatccccgatcaccggggcaggagactagcgccttctgagactatccccgatcaccggggcacgtgactagc

SEQ ID NO: 840 - DNA, 120 bp, Artificial Sequence
  Description of Artificial Sequence: Synthetic polynucleotide
aactgaaattcctaatgtctagccaaaagaaaaagcaaaataaacaatacatggaggaaaattgtgtgcagctcctatccgcacacgtcttcccctttagctcgggccagagcagccggt

SEQ ID NO: 841 - DNA, 120 bp, Artificial Sequence
  Description of Artificial Sequence: Synthetic polynucleotide
tgggctcatgccatcctcccccctcagcctcccaaagttttgagactataggcgtgagcgacctcacccagccctgcatgataattttaaaatagaaaaggaaaaatacaacttgggaaa

SEQ ID NO: 842 - DNA, 120 bp, Artificial Sequence
  Description of Artificial Sequence: Synthetic polynucleotide
tccagggtcgaaactactgcataatagttttgtttttttttttcctgagatagggtctcgctctgtcatgcaggctggaggacagtggagcgatctcggctcactgcagccttaaactcc

SEQ ID NO: 843 - DNA, 120 bp, Artificial Sequence
  Description of Artificial Sequence: Synthetic polynucleotide
aaatgatttgcaattacatatatttttaacaaagcaactacaggataaccagattccaaatgaaactacgcctggatgggcgaggtacacgtgttacaactcaaagatgcacactcgtct

SEQ ID NO: 844 - DNA, 120 bp, Artificial Sequence
  Description of Artificial Sequence: Synthetic polynucleotide
aaaggagacataggccacccggccaacctccacgaagcgcctgaacaccatgttggcggcgttaggcgagaaggaagaagacccgcccaaccctgcgcatgtgtagaagaacgcaccgcc

SEQ ID NO: 845 - DNA, 120 bp, Artificial Sequence
  Description of Artificial Sequence: Synthetic polynucleotide
tgaaaggcatggcctgtctcctcacttgagtgcaaggtccatcgaccaaagccctgttctgatcaataacatctacaatcgcgaccaattttccggcatgaggtccaaaggagacatagg

SEQ ID NO: 846 - DNA, 120 bp, Artificial Sequence
  Description of Artificial Sequence: Synthetic polynucleotide
ctgcccattttgtattgatgtctgccttctgccaggcttgtcggacatacttctggtgggcactgtgcggaaacttgaggatgaaatcagtgagctgcatgcacttgaaaggcatggcct

SEQ ID NO: 847 - DNA, 120 bp, Artificial Sequence
  Description of Artificial Sequence: Synthetic polynucleotide
attattctgttcctcattttctttgccttcataactttaaaacgatcaaaatctgtcatcttggctttcctttctctggcttcaatcttcttggcccatcgtgtggctgcccattttgta

SEQ ID NO: 848 - DNA, 120 bp, Artificial Sequence
  Description of Artificial Sequence: Synthetic polynucleotide
agcagcagcagcagcagcagcagcagcagtacccttagtaccaggtgcttttttgggagaagctttcaggagagctgccttttgaagcttcttaacttcattcttgattattctgttcct

SEQ ID NO: 849 - DNA, 120 bp, Artificial Sequence
  Description of Artificial Sequence: Synthetic polynucleotide
cttttggagcaggcgctgctttctggcctgtggctttctgggcaggaaccttctgggctggagcctttttactcgcggcggtgatcttttttgctggaactttagcagcagcagcagcag

SEQ ID NO: 850 - DNA, 120 bp, Artificial Sequence
  Description of Artificial Sequence: Synthetic polynucleotide
gtcaaaaagaacctttattactttttatgattgccacttatgctttcttgccagatgcctttggagcaggtgctttctgggctggagctttttgacccttctgagcttttggagcaggcg

SEQ ID NO: 851 - DNA, 120 bp, Artificial Sequence
  Description of Artificial Sequence: Synthetic polynucleotide
tttgaactgattatttaatgtttattataatcctactatcaatctgcctcctaactccagcctcaacaggctttaaatccaaaggcttaaatacatttgtcaacaggtcaaaaagaacct

SEQ ID NO: 852 - DNA, 120 bp, Artificial Sequence
  Description of Artificial Sequence: Synthetic polynucleotide
ttggcggcgaggtctcggcggctaagcgagcgtcggcgactgtctctccgcgagaggaggcaagttggggtccaggctccaaagccggtggccgcgtaccgcggtggagccgctgtcttt

SEQ ID NO: 853 - DNA, 120 bp, Artificial Sequence
  Description of Artificial Sequence: Synthetic polynucleotide
ggcatcgcgcctggtggcggagttctgccgagtggggcgccgcggccgctattgtcccgccccctgctccgcaagattcgagcctgagcggcctgggcgtctcgagaggtgagagagttg

SEQ ID NO: 854 - DNA, 120 bp, Artificial Sequence
  Description of Artificial Sequence: Synthetic polynucleotide
agacggaaaggaaagagctgtactcccacaatgccttttgggctcctcccccacctcagccaccctctttccggtggaaagctgcggcctcccagagcgtcatgggacatgtagttccgg

SEQ ID NO: 855 - DNA, 120 bp, Artificial Sequence
  Description of Artificial Sequence: Synthetic polynucleotide
cggtactgccagcagcggaccctcagaagaaagcgcatgacatcagactgcttctttctccatagctcctggatgtacttgtatgcacccatcttggcttacctgatggctgccgccaga

SEQ ID NO: 856 - DNA, 120 bp, Artificial Sequence
  Description of Artificial Sequence: Synthetic polynucleotide
ccaccacggcgaacacgaatcctatatataacgtaaccttgcttggccttgtagcccagtcggcgcgctttatcaggccgggtggggcggggagccctgtggagagcagagagctggcgg

SEQ ID NO: 857 - DNA, 120 bp, Artificial Sequence
  Description of Artificial Sequence: Synthetic polynucleotide
gtggcgtccagctcgctcctctgcaacggactgaaggcttcgagcaaactttagctggttaacaccatgatggacaggcttgccgtaagttgcacccttaggaactgggcgttttcggcc

SEQ ID NO: 858 - DNA, 120 bp, Artificial Sequence
  Description of Artificial Sequence: Synthetic polynucleotide
ggtgtcaggatttcttctgatagctttatggaatggatcaatgaggataacctcaaaaaatttgtatgtggaatcttcaccaacccagtaagaattcaggactctcagagccccacagtg

SEQ ID NO: 859 - DNA, 120 bp, Artificial Sequence
  Description of Artificial Sequence: Synthetic polynucleotide
gagagccaccaatagtgtggtggaacttgtggccctttccaaggccacggctctttcggcctgcagatgtcagcccacgcatctccctgtgcttgtggactggtttggtgatccactggg

SEQ ID NO: 860 - DNA, 120 bp, Artificial Sequence
  Description of Artificial Sequence: Synthetic polynucleotide
ctgtaagcagacatgactgtcctaaattgtttattaagtatgaattttacaaactttacttatattagcggtaacggtggagctggagagtattgcgccttctccaagctgcccggcgag

SEQ ID NO: 861 - DNA, 120 bp, Artificial Sequence
  Description of Artificial Sequence: Synthetic polynucleotide
ttagaaacaagatacaccaccacttattgtcttcaaacattattgcactttaactttcttaatttgacaaagcattcaagaaacatctgcagactagttttaacagacaaataacacctg

SEQ ID NO: 862 - DNA, 120 bp, Artificial Sequence
  Description of Artificial Sequence: Synthetic polynucleotide
tagtttcagttctctccttttaaagaatttattaagcctgttataccacacagtatgttttatacactgacatacaactccctaataagataaagcaaagacaaaaaagtttatcttatt

SEQ ID NO: 863 - DNA, 120 bp, Artificial Sequence
  Description of Artificial Sequence: Synthetic polynucleotide
gtctacacctgccaaactaaaaaaaacgcagccacttgaaaataaaccagcagagcattgccatcactccgataaagctgcaggtttcatcacatgcaccagacaaatctacagggctag

SEQ ID NO: 864 - DNA, 120 bp, Artificial Sequence
  Description of Artificial Sequence: Synthetic polynucleotide
gaagccatggcactgaaccaggagctttcaccttttatgtgaatttaaaatggtactgtggaggctgaggcaattttcttcaggctaacccagattttctaaagcccaacttaaaaagtc

SEQ ID NO: 865 - DNA, 120 bp, Artificial Sequence
  Description of Artificial Sequence: Synthetic polynucleotide
cagcttcccaccctagcattcattgctagcttaccaatcttaaggctaataattttatcgcacattcaacttcaaaacacaccagtgtttaccattaccactaatcactgaatgccatga

SEQ ID NO: 866 - DNA, 120 bp, Artificial Sequence
  Description of Artificial Sequence: Synthetic polynucleotide
cccctaatgtgactgaagggattcataatgatcacaattagcattacggttaagtattttagggttgacgtctaagctcacacttgaaaggtatttatctaatggccactggctcaccag

SEQ ID NO: 867 - DNA, 120 bp, Artificial Sequence
  Description of Artificial Sequence: Synthetic polynucleotide
tggaaaccatgcgcttgtgactttttctgtagcctatgggagtggacagagtgggtaacccaagatgtttttaagactgactggactaagaatgacgtacttatagccaactactttccc

SEQ ID NO: 868 - DNA, 120 bp, Artificial Sequence
  Description of Artificial Sequence: Synthetic polynucleotide
tggtatactcatagtcaaagtgggtgcacaagtgatggtccaactttgtggaatggtaaggatttttagggttgtttggccagaacaagagaaataactgcagaaaacacatatggttgg

SEQ ID NO: 869 - DNA, 120 bp, Artificial Sequence
  Description of Artificial Sequence: Synthetic polynucleotide
agtcagaatttaaaattgggcaattccttgtctacattttctttacactcaaattgaccctggacaacagtagtctagtctcctggaagacatggtgcaaacagaaatgcaatgtggtgg

SEQ ID NO: 870 - DNA, 120 bp, Artificial Sequence
  Description of Artificial Sequence: Synthetic polynucleotide
gaacttttatgaacttgctatgagtacttcctggaaatcaattaactgagtcttttgaaacccctagagaagataggagaaaattggttcagaacgagcatttaaattaagtcagcaaag

SEQ ID NO: 871 - DNA, 120 bp, Artificial Sequence
  Description of Artificial Sequence: Synthetic polynucleotide
gaaggtccatttgttttagtttaatagacatttattccttcagttgaacaacctctacacaattaaaatgtatgacttaagatcttttctttttttgtgaagaaatttaggtctcaagaa

SEQ ID NO: 872 - DNA, 120 bp, Artificial Sequence
  Description of Artificial Sequence: Synthetic polynucleotide
atccagtcaaccctcaggctgcttagggaaagaggaagagcggtggattttgggagaactcatgagaacttgacttctcgcgagattcgtagccgaagaaacgagatctgaggaggcagg

SEQ ID NO: 873 - DNA, 120 bp, Artificial Sequence
  Description of Artificial Sequence: Synthetic polynucleotide
ggtgtcctaagaaatgccatcatcgcagccatactttcccccaccaagggcttgctttcccttttatcttccagtaactacagcactgcttccacagaagtagccacacgggcctcacca

SEQ ID NO: 874 - DNA, 120 bp, Artificial Sequence
  Description of Artificial Sequence: Synthetic polynucleotide
cacctagaggaaagtacagtgtaattctgtcaatacgtacttacagtaactcattcagtataaatatcagatgattcgaacagctgctcagagagtagttgttttcattattaatccaaa

SEQ ID NO: 875 - DNA, 120 bp, Artificial Sequence
  Description of Artificial Sequence: Synthetic polynucleotide
ttgatggcctgagcagtttcacgagtgttcttaaagtgaacacgaagattggaacctcttgatttgcatgatttcgtggggttctccgggtcaagtgaatagcgaaccattttcacagat

SEQ ID NO: 876 - DNA, 120 bp, Artificial Sequence
  Description of Artificial Sequence: Synthetic polynucleotide
ccccattgcttggcctgcgcacacctgccaactccaccattgtaacgtcggaatggtacacactgtttctgtaaagtgacatctttcagatacttcgtggcttttcgtatatgcataccc

SEQ ID NO: 877 - DNA, 120 bp, Artificial Sequence
  Description of Artificial Sequence: Synthetic polynucleotide
atatgctcaatgaccagagaatctacatctaaacccttaagttcagcattactctctgcgtttttaagcatgtgcagcaaaaattcagcactctttttgggccaccgaccttgtgtccag

SEQ ID NO: 878 - DNA, 120 bp, Artificial Sequence
  Description of Artificial Sequence: Synthetic polynucleotide
acaatctgttccttttccgtaaggatcatctcaatgtggcagggagagctcatgtatgggttaatccgaccatgagctctgtaggtccggcggcgcatcttaggtgctttgttcacttgg

SEQ ID NO: 879 - DNA, 120 bp, Artificial Sequence
  Description of Artificial Sequence: Synthetic polynucleotide
ttttccttttaattacatttattttaatgctgaatttactcccgtgccataagtttttgtttcttcagtttcttctgggatatctttttcttctgggcaacctcctcttctggtttagga

SEQ ID NO: 880 - DNA, 120 bp, Artificial Sequence
  Description of Artificial Sequence: Synthetic polynucleotide
tagccgggcgataacggcagagagcatagagcgcaggaacaagcgcaacgtccaagagggaagggccagcacgtcgggggcctctctggccctacccaggccgtgttctcgatagctttc

SEQ ID NO: 881 - DNA, 120 bp, Artificial Sequence
  Description of Artificial Sequence: Synthetic polynucleotide
ggggtgggcggggaaagcctcaagcgagtggcgccgccgtgacgtcacatgggtgcgacgcggcgctctaccacgatccggacttctctgtggtgagttggacgactgactagccgggcg

SEQ ID NO: 882 - DNA, 120 bp, Artificial Sequence
  Description of Artificial Sequence: Synthetic polynucleotide
tcctggctcttgggctccttgcgccgaacctttcggtccttgttatggcggatgtccactcccatgatggcgcctcctgctcggccaggtccggaaagagagaacgggctggggtgggcg

SEQ ID NO: 883 - DNA, 120 bp, Artificial Sequence
  Description of Artificial Sequence: Synthetic polynucleotide
gccggttggtgcgactcataaacaacctcttcaacacaacctggttgaatgtggagttggttcttctggccagaaacctgtataacttgaccaacagcctcaggtagatatcctggctct

SEQ ID NO: 884 - DNA, 120 bp, Artificial Sequence
  Description of Artificial Sequence: Synthetic polynucleotide
tacctcctgaacccgcacatcatcagttatggtccccacaaccacggccgtcttgttttcccggccaggaagcttcatcttccggatcatccgggaaagggacagaggcggccggttggt

SEQ ID NO: 885 - DNA, 120 bp, Artificial Sequence
  Description of Artificial Sequence: Synthetic polynucleotide
ttaggggagtccagggccagctggtcgaaagtgaggatcttgccccctgccctgaggatgcggctgcgggcccggctggtcacgcgcagtgcacataccttcagtttgggtacctcctga

SEQ ID NO: 886 - DNA, 120 bp, Artificial Sequence
  Description of Artificial Sequence: Synthetic polynucleotide
agcggacgtagggtttggtgtggctgtgcggggttcctggggccttgccgaaatgccggtacacctctcggcccttgcgaggaccggagagcaggacagtgccacagcccttaggggagt

SEQ ID NO: 887 - DNA, 120 bp, Artificial Sequence
  Description of Artificial Sequence: Synthetic polynucleotide
tttgcactgtcagcaaaaatctttttaataagagagtaggatccagggttagtttttgtagcctcggctggcccgtcggcctctggcacgctcgaacttccggcccttggagcggacgta

SEQ ID NO: 888 - DNA, 120 bp, Artificial Sequence
  Description of Artificial Sequence: Synthetic polynucleotide
tcttgccacagcggaggacactagaggcgagcctcttctgaagcctgagcatactcatggctgcggccgcagcagcgaaaggaaagagctcgctcgggcccggctcctcccattatctgc

SEQ ID NO: 889 - DNA, 120 bp, Artificial Sequence
  Description of Artificial Sequence: Synthetic polynucleotide
gcttgcggatgatcagcccatctttgatgagcttccggatctgctgacgggagttggcattggcgatttcattggtctcattggggtctaaccagaccttcttcttgccacagcggagga

SEQ ID NO: 890 - DNA, 120 bp, Artificial Sequence
  Description of Artificial Sequence: Synthetic polynucleotide
cgggcattggctgtacccttccgcttacctatgcccatgtgcctgcccttccggcgggccaaggtgtttttccggcatcgagcccgggaatggaccgtcacaggcttgcggatgatcagc

SEQ ID NO: 891 - DNA, 120 bp, Artificial Sequence
  Description of Artificial Sequence: Synthetic polynucleotide
ctgtgatacatgtggcgatcgatcttcttagattcacggtatcttctgagcagccggcgcaaaatcctcattctcctcatccatgtgaccttctctggcattcgggcattggctgtaccc

SEQ ID NO: 892 - DNA, 120 bp, Artificial Sequence
  Description of Artificial Sequence: Synthetic polynucleotide
gccaggagcttcttgcgggccttgtctgccttcagcttgtggatgtgttccatgagaatccgcttgtttttgaacacattccccttcaccttcaggtacaggctgtgatacatgtggcga

SEQ ID NO: 893 - DNA, 120 bp, Artificial Sequence
  Description of Artificial Sequence: Synthetic polynucleotide
cttggataaagtcttgatgatctcctccttcttggcctggaggcgctcttcacggcgcttgcgtgcttccttggtcttagacctgcgggcctcagcctggtcagccaggagcttcttgcg

SEQ ID NO: 894 - DNA, 120 bp, Artificial Sequence
  Description of Artificial Sequence: Synthetic polynucleotide
ttgcagattaaggcttgttttattttaatggctgatctatgtaatcacagaggccagtatgtacagacaaagtgggaggttttatttcttggtctcttcctccttggataaagtcttgat

SEQ ID NO: 895 - DNA, 120 bp, Artificial Sequence
  Description of Artificial Sequence: Synthetic polynucleotide
ggaacaactccatgttttctaaaaggcctagagaacatatatcgggtgcctctcctctttccctttgtgttcgtcattttggcgaattactggaagatggcggttccggccgaaaggaaa

SEQ ID NO: 896 - DNA, 120 bp, Artificial Sequence
  Description of Artificial Sequence: Synthetic polynucleotide
ctcttccagttttgccatggtaacacttgtggggcattcctttttgaacagtacccattcccttgatgtctacaatatcacctttcttatagattcgcatatatgtggccaaaggaacaa

SEQ ID NO: 897 - DNA, 120 bp, Artificial Sequence
  Description of Artificial Sequence: Synthetic polynucleotide
ctcttagagtgcttaatgtgctcaatacgcacattaattctcttggcaagaatcttgcccttaacttgtttgtttacaacaatgccaacagcatgctgggtaacattgtagactcttcca

SEQ ID NO: 898 - DNA, 120 bp, Artificial Sequence
  Description of Artificial Sequence: Synthetic polynucleotide
tgcttctctgggtggagcaggctggcgctttagttgaacccaggtacctttctctttggcttctttctttttctgatcattttccttcacacgtttcaggaagctatctcggctcttaga

SEQ ID NO: 899 - DNA, 120 bp, Artificial Sequence
  Description of Artificial Sequence: Synthetic polynucleotide
ttttttgtagcccagaggtcctttatttttttttttaacacctattatgccatgaattcatagggaataggttccagcagctcaggctccttcccattggttctcacaaagtgtgcttct

SEQ ID NO: 900 - DNA, 120 bp, Artificial Sequence
  Description of Artificial Sequence: Synthetic polynucleotide
caatcaagagtgaacttcagaacttgcttcttttttttgccccccttcaccacaagctttttcacaggagccatggcggcagcggagttagaaagggaggtgagcgaactacgcagacgc

SEQ ID NO: 901 - DNA, 120 bp, Artificial Sequence
  Description of Artificial Sequence: Synthetic polynucleotide
cgatggtcaccacccctccaccaaggttcccagcttttccgttcactttgatcctttcttgcaaaaactgctcaaaattggcagcatccatgattccatcttctacagggtgggtgcaat

SEQ ID NO: 902 - DNA, 120 bp, Artificial Sequence
  Description of Artificial Sequence: Synthetic polynucleotide
tacgcgcaaccagtcacgtagattattcttcttcaaatattttttggtgagatatttcaaataccttttggagaaaggcacctcggatgtcacggtgatcttgctcttgctcctttcgat

SEQ ID NO: 903 - DNA, 120 bp, Artificial Sequence
  Description of Artificial Sequence: Synthetic polynucleotide
aagaactcatacaaaattttccagataaatgaaatttaatcctcgtcttcctcctcttcttcgtcctggttaatctggaagtaacgtaattcgtaactctctttgctgttagcaactacg

SEQ ID NO: 904 - DNA, 120 bp, Artificial Sequence
  Description of Artificial Sequence: Synthetic polynucleotide
aaataaatgagtggcgaaccaagggaagccctttgactatgatttccaattttctgttcaatccacactgcagagatacaaggataaaccaccattttggttcccaagttttattcaaga

SEQ ID NO: 905 - DNA, 120 bp, Artificial Sequence
  Description of Artificial Sequence: Synthetic polynucleotide
acccgcatctgcctccccaatggctgtcagttcggtaaagtcaccctctccttctactctggtattaccacgagaattgaaatttttaagcagaaaaaaaaagaagtcaagttacaaata

SEQ ID NO: 906 - DNA, 120 bp, Artificial Sequence
  Description of Artificial Sequence: Synthetic polynucleotide
ttaatgaatgagagaagcccatttgtatccctgaatcattgagaaaagcaacagatacaactgacagtcacactttttaaaatcaaacagtcactaccttcagcccacacctccacaccc

SEQ ID NO: 907 - DNA, 120 bp, Artificial Sequence
  Description of Artificial Sequence: Synthetic polynucleotide
tgcgtcaagagaaatttgtaatcaaaaaatgaaagtaagacgaatggcccagaaacccgcattttattgacagtcattttcccacagagaatcttagaaagatgtcgcgttttcttttaa

SEQ ID NO: 908 - DNA, 120 bp, Artificial Sequence
  Description of Artificial Sequence: Synthetic polynucleotide
gttaatttagaacctgggacttttacaatcgattccccaaacccctttatggcagcaacactgaaggagcacagtttctctctctaggaagaagaggattagcagacataattgtgtgcg

SEQ ID NO: 909 - DNA, 120 bp, Artificial Sequence
  Description of Artificial Sequence: Synthetic polynucleotide
ggagaccacatctggaagcactattcctacagctccctctgctggagacgaaagtgacagtttgttgcaaagacctgtagaaacattacttacacgttcatttctgtacacatttagtta

SEQ ID NO: 910 - DNA, 120 bp, Artificial Sequence
  Description of Artificial Sequence: Synthetic polynucleotide
gcacctcccacctccttggcatgggaggcttcccagtcactcctccttcgtgtcccctctttcaagaacctccagagctcttggcatcaggggcccccattgctgggccccacacgggag

SEQ ID NO: 911 - DNA, 120 bp, Artificial Sequence
  Description of Artificial Sequence: Synthetic polynucleotide
tgcatttttttcccagccttggtagcccctttcagttgtctagcctctgcactgtggcacaccactgacattaaatccagtcatggcctaagtggcatgaggcagctatttccagggcac

SEQ ID NO: 912 - DNA, 120 bp, Artificial Sequence
  Description of Artificial Sequence: Synthetic polynucleotide
aaaacatgaattttagacaccgtaaattctaatgcagacacttttgcattactgtttgaatttcagaagggcaccacaaggcaccagagtctttcaaagtcactcacagcaacaattgca

SEQ ID NO: 913 - DNA, 120 bp, Artificial Sequence
  Description of Artificial Sequence: Synthetic polynucleotide
cagagcaccaaatgtttaatgggagccaaggtaggactgagcattgaacttccagctatgcaactcgcagggcacaatttcaagtgtggaaaccatctgtaggcaagctcttttaaaaac

SEQ ID NO: 914 - DNA, 120 bp, Artificial Sequence
  Description of Artificial Sequence: Synthetic polynucleotide
cagagaagaaatatgcaagcaattctgcttcaaagaaatttgcatagaaatggaaaaatgccagagcctttaacacaagtgaaattgcaaagcctcaacacgttcaactcaatccacaga

SEQ ID NO: 915 - DNA, 120 bp, Artificial Sequence
  Description of Artificial Sequence: Synthetic polynucleotide
agtagaatttgtaaactcaagccacaaacttagttaataatcatggttaagggacattgccaaagagcaactgatgcctcagtgaagtttgaaagaaactctgctttctgtgacggcaga

SEQ ID NO: 916 - DNA, 120 bp, Artificial Sequence
  Description of Artificial Sequence: Synthetic polynucleotide
ttttcaaatctgggactagtttctttttttcttttaactgaaatgccaacttcagcccagggttttttcacaaccaaactaaaaatgacttactacatgggaacatcaatgcaacaagta

SEQ ID NO: 917 - DNA, 120 bp, Artificial Sequence
  Description of Artificial Sequence: Synthetic polynucleotide
ttttttacagtaagagtagccaggtgttagccactttaatagaaaatatgatcaaaactcgattacaagagttcaaaaagacatagaaaaccagtgagtttcaattttattacaagtttt

SEQ ID NO: 918 - DNA, 120 bp, Artificial Sequence
  Description of Artificial Sequence: Synthetic polynucleotide
gacacctttcaacactgccttcttggcctttaaagccttcgctttggcttcagctttaggaggggcaggagcttccttcttcgctttcggcgccatcttgtgaaaagggtctccaatgct

SEQ ID NO: 919 - DNA, 120 bp, Artificial Sequence
  Description of Artificial Sequence: Synthetic polynucleotide
tcctgggagcgctcttccgaggatatttgggctgtctccggagtcgcagtgtcttcggccgccggaaggtgggtgacgtgcggatcttcttctttttgtggctgtggacacctttcaaca

SEQ ID NO: 920 - DNA, 120 bp, Artificial Sequence
  Description of Artificial Sequence: Synthetic polynucleotide
tttaacatccacaatgaacacaagtgtgttgttgtcttctatcttcttcatggcagactcagtggtcagcggaaacttgatgatagcatagtggtcaagcttgtttctcctgggagcgct

SEQ ID NO: 921 - DNA, 120 bp, Artificial Sequence
  Description of Artificial Sequence: Synthetic polynucleotide
gaacatatgccttcttctctccatcaggccgaatcagggtgttgaccttggccacatcaatgtcatacagcttcttcacagcctgtttaatctggtgcttgttggctttaacatccacaa

SEQ ID NO: 922 - DNA, 120 bp, Artificial Sequence
  Description of Artificial Sequence: Synthetic polynucleotide
tgaaaagatatatatatatatatattcagaattaggcagctggactcagtttagatgatcccaattttgttggcaacatccaaagcatcgtaatcaggagccagtcgaacatatgccttc

SEQ ID NO: 923 - DNA, 120 bp, Artificial Sequence
  Description of Artificial Sequence: Synthetic polynucleotide
ttcaaaaggataagtagaacaggagtcttgcccaagccctgtcatgtcagtgtgtgtgtgtggcctcccagcccaaccagaaattgacagacaggcatgtatatggtgaaaagatatata

SEQ ID NO: 924 - DNA, 120 bp, Artificial Sequence
  Description of Artificial Sequence: Synthetic polynucleotide
ctcaaccatggaggcaagttctgagttctggttttcctaggacactaactctagtcacaaagatctctggaatgatcatacatggtggagtggcagggtgaggtatttcaaaaggataag

SEQ ID NO: 925 - DNA, 120 bp, Artificial Sequence
  Description of Artificial Sequence: Synthetic polynucleotide
ccaatccacactcccctgaaatggatgctaacacccttcaaaccctgggcattggtttcatacacagcctcttccagggataaaaggggttcttgtacagcttgttactcaaccatggag

SEQ ID NO: 926 - DNA, 120 bp, Artificial Sequence
  Description of Artificial Sequence: Synthetic polynucleotide
tcctctgaagtccttgtcctttattgggcaaggggtgagggaagcagacagaccggttggacatagtagatgggtgtgtgaggacaaaatgctaccagagagccagccaatccacactcc

SEQ ID NO: 927 - DNA, 120 bp, Artificial Sequence
  Description of Artificial Sequence: Synthetic polynucleotide
agaggacccaccacgtcctcgcttcgacatcttgaacgccggaaaaaagaaaaaaggaagtcgattcaaaggacactgggatatgaactttaacgccccgcccaccctcctcacgtggcc

SEQ ID NO: 928 - DNA, 120 bp, Artificial Sequence
  Description of Artificial Sequence: Synthetic polynucleotide
gccgtcccttgatccccttcacggagatgatatacaggtttttggctcctgtgttgtcagcacaattgattacagctcctaccggaagacccaaggaaatccggaatttcgcaccagagg

SEQ ID NO: 929 - DNA, 120 bp, Artificial Sequence
  Description of Artificial Sequence: Synthetic polynucleotide
gactttcgttgtcgaatgaccactgctggatgtaccttttttctgagctctggtttgcctttcttgactgtggccatcaccatgtcacccacaccagcagcgggaagtctgttcagccgt

SEQ ID NO: 930 - DNA, 120 bp, Artificial Sequence
  Description of Artificial Sequence: Synthetic polynucleotide
acactcctttgctactggtcctgtaatggcagaacctttcatctcgcctttattgttcactatgactcctgcattatcttcaaaataaagaaacacgccatcttttctacggtatgactt

SEQ ID NO: 931 - DNA, 120 bp, Artificial Sequence
  Description of Artificial Sequence: Synthetic polynucleotide
ttttgcaaacaaatactttttaatgggtttagtttttttttttattttttacaaatatactggagaatcatgcaatgctgccagcattggatgcaatccggggccacaagtctgcacact

SEQ ID NO: 932 - DNA, 120 bp, Artificial Sequence
  Description of Artificial Sequence: Synthetic polynucleotide
ccgtcggtcctggcgtagcgcctcccgtgtccggggtagatcttgtacccgctaaaactgcacagctcgaccttcatggcgacagctccacggaaagacaaaagatggcgaaaagaaaga

SEQ ID NO: 933 - DNA, 120 bp, Artificial Sequence
  Description of Artificial Sequence: Synthetic polynucleotide
actgtccctttttgtgcttccttctgtagaggacagtccagtttatctgccgaggattcctcttggaaaggaaagccgactcgcatttcgcattaagaaactggaaaaccttcccgtcgg

SEQ ID NO: 934 - DNA, 120 bp, Artificial Sequence
  Description of Artificial Sequence: Synthetic polynucleotide
ctaacttcaggtttctgattcctcttggccattatatcagcaagagatgcaccagtaatggccctctggaatttgactgctcggcgggttcttttcttttgaatttcttccgactgtccc

SEQ ID NO: 935 - DNA, 120 bp, Artificial Sequence
  Description of Artificial Sequence: Synthetic polynucleotide
aggtgctgcctttgtaggtgccttagcagcagccattgcagtctttttagatgcttgcttagccttttttgcttccttagcagccctgatagcttgttctcgttgagcctttctaacttc

SEQ ID NO: 936 - DNA, 120 bp, Artificial Sequence
  Description of Artificial Sequence: Synthetic polynucleotide
ttttttttctagagttataatccaatctttatttaaaaatctaatctgccagtttagcgttttccaccaactcggggagctgaaactttcacaggcttcacaatcttttgcttaggtgct

SEQ ID NO: 937 - DNA, 120 bp, Artificial Sequence
  Description of Artificial Sequence: Synthetic polynucleotide
agtcacaaagggattaaacttcattttggccgctcccgcttcggtgatggccgcaaaagggaagagaactacacgctgcttccggttctgtaagtttaccaaagatctcgcgagacctat

SEQ ID NO: 938 - DNA, 120 bp, Artificial Sequence
  Description of Artificial Sequence: Synthetic polynucleotide
catggatcgcacgttgtacttctgtctcagctctttggaaagaggggaagacataatcttccttcgaatgtgggaaggtgcattgaaatgccttttgcgattcttgcttcggtcggaagt

SEQ ID NO: 939 - DNA, 120 bp, Artificial Sequence
  Description of Artificial Sequence: Synthetic polynucleotide
gctgcacccgttcaatgtagataacatatttcttcctgtaaacctggactactttgccaatttgctgacctttatagtgtccacgtacaacctgaacttcatcatcctttcggatgggca

SEQ ID NO: 940 - DNA, 120 bp, Artificial Sequence
  Description of Artificial Sequence: Synthetic polynucleotide
cgagatttggctttccgttcgaggatctttttgcggtctttgtccagttttagcctagtgataaccaccttgctggggtgaatgcctacgtggacagttgtgccattagccttttcccgc

SEQ ID NO: 941 - DNA, 120 bp, Artificial Sequence
  Description of Artificial Sequence: Synthetic polynucleotide
ttttttttcaggctctttgtttcaagttttaatcaaagcttgtatataagattactttattcctgcatcttctcaatggtttcttccttgtatttgcccttttcctttcctacttggcga

SEQ ID NO: 942 - DNA, 120 bp, Artificial Sequence
  Description of Artificial Sequence: Synthetic polynucleotide
aactgttgaagaatcggggctaggtgtgctgtactgcacgccgcccgtgcttgcttgagccaggcccttttctggcgccttggtcagggaaccgcctaagccgaccctaagggcctcgtt

SEQ ID NO: 943 - DNA, 120 bp, Artificial Sequence
  Description of Artificial Sequence: Synthetic polynucleotide
gggattgcgcgcctgctagtcgcttcctctttctgagggtggtgatcccccatcacggagtgtcctggtggcggtgtacggtttcggtgaggctcgttgtgctaggctcggagggcgaga

SEQ ID NO: 944 - DNA, 120 bp, Artificial Sequence
  Description of Artificial Sequence: Synthetic polynucleotide
cccagacgaaaaaggaaggccttcgccaagtctcgcgaggtatcggccacgggggcggggcaaaacgcctcacttccggtcacagaggccgggcttcgggcggggcctcctggtctcgcg

SEQ ID NO: 945 - DNA, 120 bp, Artificial Sequence
  Description of Artificial Sequence: Synthetic polynucleotide
accaccagcattaccgcggccgccggggtgcttccggtgcttgcctatgcggccgtggccgtggctcacgtggcccctaagtttccgggtcttcctcagtctggatggcatgttggcagc

SEQ ID NO: 946 - DNA, 120 bp, Artificial Sequence
  Description of Artificial Sequence: Synthetic polynucleotide
ttgtcaaggttgacagttgggcagaagctctggttcctctttaagtggtaatgcttcataccaactttcccaaagtagcctgggtggtatttgtcgaagttgatccggtggtgatgcaga

SEQ ID NO: 947 - DNA, 120 bp, Artificial Sequence
  Description of Artificial Sequence: Synthetic polynucleotide
gctttccctttcccagaactttgtagtagcccgatcgcaccacatcaatgatgggagcagccccagtcttgtttttagcagcattcacccgtgtctgttcactgaccaaagtccacaatt

SEQ ID NO: 948 - DNA, 120 bp, Artificial Sequence
  Description of Artificial Sequence: Synthetic polynucleotide
tgaaactccctccatgtggcttcaagccaccaggacacaggcccccccaacactcttaatcttctcctcagctcttctgctgaagaatttggccttcacgatgacaggctgctttgggag

SEQ ID NO: 949 - DNA, 120 bp, Artificial Sequence
  Description of Artificial Sequence: Synthetic polynucleotide
aggaccccatgtcttcataccctaagtactagaacctgggctcccaatgcacacaggatgtagaggtgccactgaagaacctacactcacaccacaaggaaaaagtagttagcatttaat

SEQ ID NO: 950 - DNA, 120 bp, Artificial Sequence
  Description of Artificial Sequence: Synthetic polynucleotide
atacatgcaggcctttcagtgatcaacaggtattattctgactttataaacagaaatgtttaactggccaacgtctgtgttggtcttacgtttaccatatatttgagggaagtcaggaga

SEQ ID NO: 951 - DNA, 120 bp, Artificial Sequence
  Description of Artificial Sequence: Synthetic polynucleotide
ctcattcctatcacactgcccctctttagaatgtgacccatcaaaatggaatctttccttttgagccctgttgaacaattagggtacattctctcattcactgtaaaattcagagtacaa

SEQ ID NO: 952 - DNA, 120 bp, Artificial Sequence
  Description of Artificial Sequence: Synthetic polynucleotide
gccgagatcgtgccactgcactccagcctggcaagagagactccgtttaaaaaaaaaaaaaagatgagggggccacgtggaaaaaccttgggctgagaacttaagtcctaaaggaccatc

SEQ ID NO: 953 - DNA, 120 bp, Artificial Sequence
  Description of Artificial Sequence: Synthetic polynucleotide
cccatctctactgaaaatacaaaaattagctgggcatggtggtgggcgcctgtaatcccagttagtcaggaagctgaggcaggagaatcgcttaacctgggaggcggaggctgcagtgag

SEQ ID NO: 954 - DNA, 120 bp, Artificial Sequence
  Description of Artificial Sequence: Synthetic polynucleotide
ttaaggagccatggccgggcgcagtggctcacactataatcccagaacttttggaggccgatgtgggcagatcacttgaggttaggagttagagaccagcatggccaacatggtgaaacc

SEQ ID NO: 955 - DNA, 120 bp, Artificial Sequence
  Description of Artificial Sequence: Synthetic polynucleotide
tttcaaacccactttgacatacagaaaagccctggcatactgaaatttcagattgctggacccccatctcgagattttgattcatcacattctggatgtaacaataatttggatcaagat

SEQ ID NO: 956 - DNA, 120 bp, Artificial Sequence
  Description of Artificial Sequence: Synthetic polynucleotide
gtcaccatcagttttccaatagcaagagacacaaatcctagaaaaacttatttcaatttccagccttcaggatttccaaattttcccgatacatttcagactagaagaaaaattaactat

SEQ ID NO: 957 - DNA, 120 bp, Artificial Sequence
  Description of Artificial Sequence: Synthetic polynucleotide
agttttagactgtattattttgggtcaaaaaaagctcaaaatcacaggaagaaccataaaactgtagcaaattataatttaccgagatctatgaggatcttatttgtaaacatgaattgg

SEQ ID NO: 958 - DNA, 120 bp, Artificial Sequence
  Description of Artificial Sequence: Synthetic polynucleotide
tcctgacagatgtgtcccatagacagccatggttctcggcttattatgaccccacagtgcactaaggaaacctccactaactaaaacccaggagtctaagtgccatcttatttgtctata

SEQ ID NO: 959 - DNA, 120 bp, Artificial Sequence
  Description of Artificial Sequence: Synthetic polynucleotide
tttaaaattgtccagctgaatcgaggtttcactacttgtaattctagcctattcttatgtaagccaattcagtgcttctctgtgccttctatttgatccccaacatcctctaaaggttgt

SEQ ID NO: 960 - DNA, 120 bp, Artificial Sequence
  Description of Artificial Sequence: Synthetic polynucleotide
ggctaattttgtgtatttagtagagacaaggtttctccaggttggtcaggctggtctggagagcccttatttctaacttctccagcacaacagaagatacaagccaaatgatacatttgt

SEQ ID NO: 961 - DNA, 120 bp, Artificial Sequence
  Description of Artificial Sequence: Synthetic polynucleotide
tgttgcccaagctggagtgcaatggcacgatctcggctcacagcaacctccgcctcctggagattctcctggctcagcctccaaagtagctgggattacaggcatgtgccaccacgcctg

SEQ ID NO: 962 - DNA, 120 bp, Artificial Sequence
  Description of Artificial Sequence: Synthetic polynucleotide
atgaactactgaccacttattgtgggatccttggattcaggttccatattacaagtcctctatgggccctaatggagagcccttactttttttggggggggtggacagagtttcactctt

SEQ ID NO: 963 - DNA, 120 bp, Artificial Sequence
  Description of Artificial Sequence: Synthetic polynucleotide
ttttaatctacacaatcctcaggtaggcactttcactgaaattttaaagatgaggaaattaggactaaaagtcacacaggtattgggtgaagaccaaatattgagtcttttaattcatca

SEQ ID NO: 964 - DNA, 120 bp, Artificial Sequence
  Description of Artificial Sequence: Synthetic polynucleotide
gtctgaacctaggaggcggagcttgcagtgatctgagatcgcaccactgcactccagcctgggcgacagagcgagactccgtctcaaaacaaaacaaaaaattaagtgcacggtttccat

SEQ ID NO: 965 - DNA, 120 bp, Artificial Sequence
  Description of Artificial Sequence: Synthetic polynucleotide
cgagaccatcctggctaacacggtgaaaccctgtctctactaaaaatgcaaaaaattagccgggcgcagtggcgggcgcctgtagtcccagctacttgggaagctgaggcaggagaatgg

SEQ ID NO: 966 - DNA, 120 bp, Artificial Sequence
  Description of Artificial Sequence: Synthetic polynucleotide
taatagtttgcacttaagttactaagtcaaacacaaaaattaagtgcctgggccgggcgcggtggctcatgcctgtaatcccagcactttgggaggctgaggcgggcagatcaggagatc

SEQ ID NO: 967 - DNA, 120 bp, Artificial Sequence
  Description of Artificial Sequence: Synthetic polynucleotide
catagcacttcccgtttgcctaaccttcccaaaccagtttcctgaaccagtattccctctgcttggaccaatttcccactgacaatcacatgaaggccaattgactccatctgctcccgt

SEQ ID NO: 968 - DNA, 120 bp, Artificial Sequence
  Description of Artificial Sequence: Synthetic polynucleotide
gtccattatgccgtctgaatcgtaccttttccatactcactcccattttcttggttctgccttcagcctcccattgtagccgtcctttacagcccggccagagtaatctttctctccacc

SEQ ID NO: 969 - DNA, 120 bp, Artificial Sequence
  Description of Artificial Sequence: Synthetic polynucleotide
acaactcctggggaagaaggtagccattaagggactagggatccttccccccaaactctacttccttccatgccttatcattttgtggtcggcccactacaattcagtctccaagtcccg

SEQ ID NO: 970 - DNA, 120 bp, Artificial Sequence
  Description of Artificial Sequence: Synthetic polynucleotide
tctgttcctcatcacatgaaacagtttttagaactgttagtagctgtagcttctggtgagtgaacaagccagcaacgaaatcagtgtttctttcccaggccaggggatcggatggcctaa

SEQ ID NO: 971 - DNA, 120 bp, Artificial Sequence
  Description of Artificial Sequence: Synthetic polynucleotide
tatgagcctccatgaacacagcaggctattcaaagcttggcagtcatgaaaatattttagtaaatgcgggttcaagaaagcactggaatcggcggacttagggctcaaaactattttcgt

SEQ ID NO: 972 - DNA, 120 bp, Artificial Sequence
  Description of Artificial Sequence: Synthetic polynucleotide
atcaagttgcacctgcagctcccacgtttgaacgcaactatatttaaggcatatatacattagaccagaaattagatcttttgcaattcaagctttagccagccactagagatcgccagt

SEQ ID NO: 973 - DNA, 120 bp, Artificial Sequence
  Description of Artificial Sequence: Synthetic polynucleotide
gctagttagccgctaagtagggtttagtagtacatttattttgattgaaagctcgcctgatttagctgcccttgacgagcactgcttgtgcaaattatgtggcagccatttgtcataaaa

SEQ ID NO: 974 - DNA, 120 bp, Artificial Sequence
  Description of Artificial Sequence: Synthetic polynucleotide
ccactgaggtcgggtcgtgctgactgatgaacgcggccgatggagccaccaggtgggcgctgcacagcttccgcccgcgcttccgacttgcagtccgtccgtgggctgtctgctcttggg

SEQ ID NO: 975 - DNA, 120 bp, Artificial Sequence
  Description of Artificial Sequence: Synthetic polynucleotide
gggcttcttccggtctgggacgcgggggagtcatcgtctccggaagtagaagctactcaccggaagtggttctcaggtgccggggtaagacccaaggtccggtctgtgttgtgaggacgc

SEQ ID NO: 976 - DNA, 120 bp, Artificial Sequence
  Description of Artificial Sequence: Synthetic polynucleotide
cgcccaaggaccaggggtggagttgaacatcccgcctctccaggggagttatctgcgctcgcgcaccactggccggctccgcccttgccggaagtggccgagcgaggccggtctccgccg

SEQ ID NO: 977 - DNA, 120 bp, Artificial Sequence
  Description of Artificial Sequence: Synthetic polynucleotide
ggaggttcccatctcgaagatttacgtaaaggccacgcccactgttcttaaacgcaccctaaaggggctcgaagtgcggcgaggttggccattcctccgcttcgaaggggacccacggcc

SEQ ID NO: 978 - DNA, 120 bp, Artificial Sequence
  Description of Artificial Sequence: Synthetic polynucleotide
attccttttatgttcttctagaatatttccatccgtgtacaagcactttcttttttagcccaaagtgcccttgaatgtcgctgacgctcattaccttttagacaattgagacaaattctg

SEQ ID NO: 979 - DNA, 120 bp, Artificial Sequence
  Description of Artificial Sequence: Synthetic polynucleotide
ttctcaagatactttcgctccatttatattgcctctcaatatgaaaatacgcattgggttgaacaaaaaactgcaccaaaacatacttcgtgctcatttccctaacctcctaagaggaaa

SEQ ID NO: 980 - DNA, 120 bp, Artificial Sequence
  Description of Artificial Sequence: Synthetic polynucleotide
attccaaaacaaatttatttgcctgtggaggtgggggtgtaatttaaaaggccatgaaaactctcgaaagagaaaatattacttttcagcaacggcaagttctggtagtttttttttttt

SEQ ID NO: 981 - DNA, 120 bp, Artificial Sequence
  Description of Artificial Sequence: Synthetic polynucleotide
agaggaaaataaaaattgggatgtaaaatagagccaggaattaaatttacgctttaacctatattcttgctaggggagctacacaaaatacgtttctagagccagatgatgtggtatgca

SEQ ID NO: 982 - DNA, 120 bp, Artificial Sequence
  Description of Artificial Sequence: Synthetic polynucleotide
ttcagttacatttttgttaaaaacatcttttcgcatgtacacttataacctactttataccaaaatgacttacagggatacacaaactaggttatttgaaacaacgtaaagtgggaatga

SEQ ID NO: 983 - DNA, 120 bp, Artificial Sequence
  Description of Artificial Sequence: Synthetic polynucleotide
gatgacagctttgcgtccggagtagcgtccagccaggacaagcaccaccttcccaggtttcatgaacttgcccatttcggcagcaaccacccggccctaccagcaaaaaggaaagaagga

SEQ ID NO: 984 - DNA, 120 bp, Artificial Sequence
  Description of Artificial Sequence: Synthetic polynucleotide
tctcttggcgatcttcttcttgcccatggcagctgtcactttgcgggggtagcggtcaattccagccaccagagcatggctgtaggggcgatctgaggtgccatcatcaatgttcttcac

SEQ ID NO: 985 - DNA, 120 bp, Artificial Sequence
  Description of Artificial Sequence: Synthetic polynucleotide
agcaggatctctgaagacatccttattgacgacagttttgtccaaggggatatccacagagtaccttgtgggcattaggtgattgtagttatacactttcacaaaagattttatctttga

SEQ ID NO: 986 - DNA, 120 bp, Artificial Sequence
  Description of Artificial Sequence: Synthetic polynucleotide
tttttaatgatcaaaacaaagcatctaaaaccgcagtttctggaagaaccacttgttcttgcctgtcttgtatctctcttcaaacttgaccttggcctcccgtcgggccttgcgtttaag

SEQ ID NO: 987 - DNA, 120 bp, Artificial Sequence
  Description of Artificial Sequence: Synthetic polynucleotide
gctgtaggtctgcttattcctcttgatcaggaaactggagcagttccgcacgaccatccattgcagatgcgcagacatggcggcggctcccttcgcagcggcgacctgagacggaaagag

SEQ ID NO: 988 - DNA, 120 bp, Artificial Sequence
  Description of Artificial Sequence: Synthetic polynucleotide
cttaatgaccaccacgacacctttgccgtcggctgccggctccacgcccacagtcttgcggtgaatcagtccgttgtagcggaaggaattgcgggccttcaagttattgggctcagtgct

SEQ ID NO: 989 - DNA, 120 bp, Artificial Sequence
  Description of Artificial Sequence: Synthetic polynucleotide
ggggcggtacttgttcttgcggatcatgtgtctgatgctgctgagcgtggcgcgagcattcttgttgatggtggtccgcacataggaggtggcaggcttccgctggccggatctccgctt

SEQ ID NO: 990 - DNA, 120 bp, Artificial Sequence
  Description of Artificial Sequence: Synthetic polynucleotide
ctgggggcagggggctcaggagctcttggtggggcgggtccgcttcctcttcaccatcacaggcttctggctgcgcaggatggcgctggccctgcggatggctgccatgcgcaggtcggg

SEQ ID NO: 991 - DNA, 120 bp, Artificial Sequence
  Description of Artificial Sequence: Synthetic polynucleotide
tgcagagttttgatgacatggcctgaatgacaacacacagggccagagctccccagagcgtttcaaaaagggaggcccagtcgaggcaggtgagaaagccagctgactttattgctctgg

SEQ ID NO: 992 - DNA, 120 bp, Artificial Sequence
  Description of Artificial Sequence: Synthetic polynucleotide
gtcagcaaactttttctgtgaagacagtgacccttgccctcaccagggacaaggcagctaccccacccctcctgcatggccagccattgacatcacctccagatggacaaggtgacatgc

SEQ ID NO: 993 - DNA, 120 bp, Artificial Sequence
  Description of Artificial Sequence: Synthetic polynucleotide
ccctcagcctgcacccttctgggctagaaaaggcctttcttcttctgaatggaagccactgccccagctgggattcttcaggccacctcacaatgggacagtaggtctcaatcacaagtc

SEQ ID NO: 994 - DNA, 120 bp, Artificial Sequence
  Description of Artificial Sequence: Synthetic polynucleotide
ccactccctggatgcaaaagtcatctcatcttcctcccgtgatgtctgtcgtcccccaggtcttgggaacaccccaagtccccaaaccgtgctacagcaccagggcccagggcccagccc

SEQ ID NO: 995 - DNA, 120 bp, Artificial Sequence
  Description of Artificial Sequence: Synthetic polynucleotide
ggctgtaccctggggctgccatctcccttacagttataagccaccacccaccaagttgcccatctcagagatgaggttgcatcaagtaaagcccatcccctccaaatgtggctgcaccca

SEQ ID NO: 996 - DNA, 120 bp, Artificial Sequence
  Description of Artificial Sequence: Synthetic polynucleotide
agcggccactgagatgagacctaagtgacaagagccagctcaaagagacaggggagggatggggacacctggaggacgggagtagggggacaatgctaaggctgctcaatgcctgctggc

SEQ ID NO: 997 - DNA, 120 bp, Artificial Sequence
  Description of Artificial Sequence: Synthetic polynucleotide
taggatggtctcaaactcctggcctcacaagctgtaataaacactagggagcaaacaggccaaaggaaacaagagggctgggcaatcaggaaagcttgggtgacagggtggcccaggagc

SEQ ID NO: 998 - DNA, 120 bp, Artificial Sequence
  Description of Artificial Sequence: Synthetic polynucleotide
ctcaagtgctccgctcacctcagcctctactcaacctctgaggagctgggaccacaggcggtgcaccaccacacccagctaattttattttagagacggtgtctcattatgttgcctagg

SEQ ID NO: 999 - DNA, 120 bp, Artificial Sequence
  Description of Artificial Sequence: Synthetic polynucleotide
tgtgaggatcaacagcaggactctttccccatccaggcctcactgtgtgtcatggtgtcttccaggctggagtgtagtggtggggctcatgggctcactgcagcctcatactcttggctc

SEQ ID NO: 1000 - DNA, 120 bp, Artificial Sequence
  Description of Artificial Sequence: Synthetic polynucleotide
agggagcagagtccttctttgaatcgggtaccccaggatggcaggaaccaggggtgccatggatgctggatccttggtccctggcagtggctgacagagttaggtgcccaggaaacatgt

SEQ ID NO: 1001 - DNA, 120 bp, Artificial Sequence
  Description of Artificial Sequence: Synthetic polynucleotide
agggcagtggtctgcctcaaaacgcagggctcccagccccgtacgaccccaaccaatggcaagtcgaggccctgacagtccccttactctcagtcagagccgggggtggtctcagacagg

SEQ ID NO: 1002 - DNA, 120 bp, Artificial Sequence
  Description of Artificial Sequence: Synthetic polynucleotide
cccaactaagggaaggacaaaggaaatggtaattcacagcagacaggggctggcaagtggtcagatctgctctccttcgagctgggcaagactggagcagacaggactgaggtcggaagg

SEQ ID NO: 1003 - DNA, 120 bp, Artificial Sequence
  Description of Artificial Sequence: Synthetic polynucleotide
agtgaggccagctggaggtgggcctgagtgggattgggacagtgcggggggtcctgagcaggtaccaagtcacccaactcagttttaaggcaacacctctcaatctgagctaatagaccc

SEQ ID NO: 1004 - DNA, 120 bp, Artificial Sequence
  Description of Artificial Sequence: Synthetic polynucleotide
tgagcagtgagctctccttatgaaggcggagtcccagcgcagtgaggccagccagagatgggcctgagtgggactgggacagtgggggctcctgagcaggtacgaagtcaccagcggagt

SEQ ID NO: 1005 - DNA, 120 bp, Artificial Sequence
  Description of Artificial Sequence: Synthetic polynucleotide
agacaaacatgagacagataaacctgccagcttgtgggctgcaaatcagtgctgtggaggacaactgaagcaggtgccaggggagaggcctcacgagaaggggccatctactaacgtgag

SEQ ID NO: 1006 - DNA, 120 bp, Artificial Sequence
  Description of Artificial Sequence: Synthetic polynucleotide
aagtctccagtgagcaaactctcaggaccggtgggctttatacattcaatatgcaccattcatcaagcatctcattatatgctggtgtgctagacaaaccccttgcccaccagcacaaga

SEQ ID NO: 1007 - DNA, 120 bp, Artificial Sequence
  Description of Artificial Sequence: Synthetic polynucleotide
actcgggaggctgaggcaggagaatcgcttgaacccaggaggtggaggctgcagtgagccaagatcgcgccattgcactcgccagcctgggcaacagagcgagactccatctccagaaag

SEQ ID NO: 1008 - DNA, 120 bp, Artificial Sequence
  Description of Artificial Sequence: Synthetic polynucleotide
ggtgggtaatttgaagtcaggagttccaaaccagcctgggcaaaatggtgaaaccccatctctgctaaaaatacaatactgagctgggtgtggtgacacccacctgtaatcccagctact

SEQ ID NO: 1009 - DNA, 120 bp, Artificial Sequence
  Description of Artificial Sequence: Synthetic polynucleotide
ggcacaagcctccagggcaggcaaggaggtggttaaggacaaggccttctgagcagcagcagccacatcagaaagcctcgagcgcctgtaatgccagcactttgggaggctgaggcaggt

SEQ ID NO: 1010 - DNA, 120 bp, Artificial Sequence
  Description of Artificial Sequence: Synthetic polynucleotide
cagaggcccactaagctgggctgtgttacggatgagaccaggggaggccacacagcagggaggattcagatagggatggagaaagccagcaggactccacagggggtggggcctagaggc

SEQ ID NO: 1011 - DNA, 120 bp, Artificial Sequence
  Description of Artificial Sequence: Synthetic polynucleotide
catctccctccctccagccctctcctggttcctccaccccaacccaccgatagcattcagataccagacgtggcctccccagcccagccacacagacaggctggccacccgcaggaacag

SEQ ID NO: 1012 - DNA, 120 bp, Artificial Sequence
  Description of Artificial Sequence: Synthetic polynucleotide
tggaatagatggccccatccaacatctctctctccaagatgaggtctagaggagggaaatggtgtctccacgtttgctcagcacactgaggactccaaactctgtggggctgagaccatc

SEQ ID NO: 1013 - DNA, 120 bp, Artificial Sequence
  Description of Artificial Sequence: Synthetic polynucleotide
tctttggctttcagcatttttactatggtgagcctgcctgttttcttaatatcatgtttttggtttaactggttttccaatttccaggccaacagacatgatttgtgtgaataaagctgg

SEQ ID NO: 1014 - DNA, 120 bp, Artificial Sequence
  Description of Artificial Sequence: Synthetic polynucleotide
cagcactctggatgtgtccccactgcctgggcctggtttctgatgagggcagctactaactttatcagggaccttctgtatgtgacaagacgcttttcttttgttctcccaattttgtct

SEQ ID NO: 1015 - DNA, 120 bp, Artificial Sequence
  Description of Artificial Sequence: Synthetic polynucleotide
gagctgggactggaacccaggcagtttgattcctggcttccgtgaaccattagccctgagctgggaatgctgccgggcatcactcttggggataggatgacctgggggaggttctttcag

SEQ ID NO: 1016 - DNA, 120 bp, Artificial Sequence
  Description of Artificial Sequence: Synthetic polynucleotide
cacctgccttatgcagggctgtgaaaggcactcaaaatggccttttacatatgggaaactgaggcacggtgctactaaacgagctgcccaagtccccacagctgggcataactggcagag

SEQ ID NO: 1017 - DNA, 120 bp, Artificial Sequence
  Description of Artificial Sequence: Synthetic polynucleotide
ggagtccccagcgctctgcacaactttgggcttggcagccttccagggtgcgccctacgctcactcaccatgcagctactggactaagagctggagagacagcagtgaacactgagacac

SEQ ID NO: 1018 - DNA, 120 bp, Artificial Sequence
  Description of Artificial Sequence: Synthetic polynucleotide
ggaacttgcccaaggttgcacagccaccgagcagcagagccctgacccagtagatgccagcatgtcctgtgaacagaggatgcctcagtcccgagtctctgctgctgtggggagtctgga

SEQ ID NO: 1019 - DNA, 120 bp, Artificial Sequence
  Description of Artificial Sequence: Synthetic polynucleotide
gatttgtgggcacagtcaagcaggttttgcacatttaatcttctcatcaaccctgagtagtagggtctatcgacacgcatgttacagatgagggtacgaagacacagagaggttgaggaa

SEQ ID NO: 1020 - DNA, 120 bp, Artificial Sequence
  Description of Artificial Sequence: Synthetic polynucleotide
gaaacacgagcattagtttgtgtacaaattagtcataggcatgtgaagacatctgtgatcatgagtccatctgatcaaaatatttataaaaagtcattaatttattcctacaatcaggat

SEQ ID NO: 1021 - DNA, 120 bp, Artificial Sequence
  Description of Artificial Sequence: Synthetic polynucleotide
tattcacaaacacgggcaggaggctgggaaagctcacagccccacaggacggcggggcagacctggagccaccaggcattactgcacatggatctggcatgtcttccaggtgcttgggaa

SEQ ID NO: 1022 - DNA, 120 bp, Artificial Sequence
  Description of Artificial Sequence: Synthetic polynucleotide
tttttaaagtagatgattttattctagtaactggctacaagagaaacaggggaattgataccattcctgggcagcgccaaacagcctgggctggaaatgcagctgaggacagaatgatat

SEQ ID NO: 1023 - DNA, 120 bp, Artificial Sequence
  Description of Artificial Sequence: Synthetic polynucleotide
gtggtgtggttcttggacttggccatgtctgcaccataagccgcggctcccgaagcgcctagaaccggaagagaaaggggctgcggtgcagcacgggaaatagggtcaacaacgccggaa

SEQ ID NO: 1024 - DNA, 120 bp, Artificial Sequence
  Description of Artificial Sequence: Synthetic polynucleotide
cttggcaaagcgcatgttcctcaggaacttggggtccacccccttaagagattcgtatctttgtgatcggggtttcttgataccatttctgtgccattttcgggactggttgtgtgtggt

SEQ ID NO: 1025 - DNA, 120 bp, Artificial Sequence
  Description of Artificial Sequence: Synthetic polynucleotide
gggatcttgggcttaacctccttgggctttacgagggccttgatagcctcggcacgtgcactcatggccttggcattgttggcctgcatcttctttaggccctttttgttgtgcttcttg

SEQ ID NO: 1026 - DNA, 120 bp, Artificial Sequence
  Description of Artificial Sequence: Synthetic polynucleotide
cttggcctttggccggcacagcctgagccccttggcaatacgggcacgagcacgcttcccaagcttggggtgggcaatgtaggcaagtcgatcgagcttgcggctgacaccctttgggat

SEQ ID NO: 1027 - DNA, 120 bp, Artificial Sequence
  Description of Artificial Sequence: Synthetic polynucleotide
agagatatctactctgaagcctttgtaggggcctgggtacgtttgggagcctgagctggaactgaagctggggctgcagcctgggccttggtttgatccttggccttggccttggccttg

SEQ ID NO: 1028 - DNA, 120 bp, Artificial Sequence
  Description of Artificial Sequence: Synthetic polynucleotide
tttcctgcctcaggtttatttgtacaaatagcacaggaggaccccagccccatgcagatggtagcccaggggcgggggtggggggtcgcaccagtccttctgtcctcatgttggcagaga

SEQ ID NO: 1029 - DNA, 120 bp, Artificial Sequence
  Description of Artificial Sequence: Synthetic polynucleotide
accatcttcctgccttaggagcgggacggcccccaaccaacagcagccgctaagatggccggggaacgagaaaggaaagacttcccacaatgcaaagctcttcacggcagagccggaact

SEQ ID NO: 1030 - DNA, 120 bp, Artificial Sequence
  Description of Artificial Sequence: Synthetic polynucleotide
gatcatcttcagagtctgcttgtaccccaggacgtacttcccacttttcataacgagttggagcctagagttgatcgactccagcgactttttcgtcttctttgcggccaccatcttcct

SEQ ID NO: 1031 - DNA, 120 bp, Artificial Sequence
  Description of Artificial Sequence: Synthetic polynucleotide
gtagtgatggacaccagttttagccaacatagcatagtactctatttcagatttcctcaaagctgggcagttgttagcgagaatgaccaatttcgctttgccttgtctgatcatcttcag

SEQ ID NO: 1032 - DNA, 120 bp, Artificial Sequence
  Description of Artificial Sequence: Synthetic polynucleotide
ttctggcatgcttctaatgatgtcagagtcacctggatcaatgatagccagtgtgcacactctgtagtattttccgcatgctgtgcccagttcaatattattgccactgtagtgatggac

SEQ ID NO: 1033 - DNA, 120 bp, Artificial Sequence
  Description of Artificial Sequence: Synthetic polynucleotide
tagatacaatgtttttaaaacaagcaaattttattaaaggaaaattttgcaggtttaaggtttgcaggtgaaattttgtaggtgaaaaggtttacttttcaccagtctgttctggcatgc

SEQ ID NO: 1034 - DNA, 120 bp, Artificial Sequence
  Description of Artificial Sequence: Synthetic polynucleotide
tttcttctcgccacccttctttgcgggagccattctgcagcgtccaagttggaaaggaagagcgcgaaggattgtgggagaaggaaagccgcagttgcaagtacaacttccgggtcgcca

SEQ ID NO: 1035 - DNA, 120 bp, Artificial Sequence
  Description of Artificial Sequence: Synthetic polynucleotide
gaggtgcacgcttcttgaagcccactccatggatgcgcttgtgaatgttgatggtgtattctcgggttaccacttcgttgatggcagaacggccctttttcttctcgccacccttctttg

SEQ ID NO: 1036 - DNA, 120 bp, Artificial Sequence
  Description of Artificial Sequence: Synthetic polynucleotide
tcctttggcccagacagctttgttgagcctggtgtcaatgcgcacatctggagttcccatctccttcatggcaaatttccgaatctctttgagtgcccgaggtgcacgcttcttgaagcc

SEQ ID NO: 1037 - DNA, 120 bp, Artificial Sequence
  Description of Artificial Sequence: Synthetic polynucleotide
acataggtaaccaaagtatatagcttatttggtgaatcttcatcctcattacgttttctggacagccgcacacggattcggtatggcacattccttattcctttggcccagacagctttg

SEQ ID NO: 1038 - DNA, 120 bp, Artificial Sequence
  Description of Artificial Sequence: Synthetic polynucleotide
ttttgaaggcaattttataactttatttgatctgacgatcagcgattagttctcatccacattgactgtctgtagatttttgaaagtggtaacaggtacataggtaaccaaagtatatag

SEQ ID NO: 1039 - DNA, 120 bp, Artificial Sequence
  Description of Artificial Sequence: Synthetic polynucleotide
ttcacaaggggtctgagggcggccatgatgccgagaaggagatggctgccacctccgtaggcagcgccgaggaagagagaagggacggtggcgcgcaagggctgatgggtcgtaacccct

SEQ ID NO: 1040 - DNA, 120 bp, Artificial Sequence
  Description of Artificial Sequence: Synthetic polynucleotide
tcttctacgaaccctgttgtcaatgcctctgggtttccgccagttacgcttaattttgacatatcggtctgactggtgccggatgaacttcttggttctctttttgacgatcttgggctt

SEQ ID NO: 1041 - DNA, 120 bp, Artificial Sequence
  Description of Artificial Sequence: Synthetic polynucleotide
agcacttccagctccttgacgttgtggaccaggaacttccggaagccactgggcagcatgtgctttgtttttttgttgcttccataaccaatgttgggcatcaagatctggcccttgaat

SEQ ID NO: 1042 - DNA, 120 bp, Artificial Sequence
  Description of Artificial Sequence: Synthetic polynucleotide
ggcattggggttggtgactctgatggccagttgggcagctctttccacgatggctttgcggttcttggaggaaacattgtgagcgatctcggcacagtaagatttgttgcacatcagcag

SEQ ID NO: 1043 - DNA, 120 bp, Artificial Sequence
  Description of Artificial Sequence: Synthetic polynucleotide
ggccaagaagctgaagacttaaaatcaaggaaggaagatgccagatggcagtttttacatttatttaaacagaaaacgtgcacatgagctgcctactcattttcttcactgcgcagcctg

SEQ ID NO: 1044 - DNA, 120 bp, Artificial Sequence
  Description of Artificial Sequence: Synthetic polynucleotide
tgtgcacttgaggccacattcccctgttcaaggactgagtgtcctttacaaatcccctccaaatgggagattccaaaggggcttaagcaaaagaacaatctctgtggcaaactaagttgg

SEQ ID NO: 1045 - DNA, 120 bp, Artificial Sequence
  Description of Artificial Sequence: Synthetic polynucleotide
atgactacttgtggcttgggagccacaagcttcttcaagtgtctcagaacctacctggtgtgagggccaagtctgtacccctcatacccagcctcaactggagatgactaaggctagtct

SEQ ID NO: 1046 - DNA, 120 bp, Artificial Sequence
  Description of Artificial Sequence: Synthetic polynucleotide
catcccgtaagaatctgtgtaagaaattcatctggatatttccatgcatattttctcaattctcacaagcatcacatggaataacttgtcacctaactttacaaaagcaaggctaagaat

SEQ ID NO: 1047 - DNA, 120 bp, Artificial Sequence
  Description of Artificial Sequence: Synthetic polynucleotide
gtgggagggttataggagactgaaagtgcttttccagttaaccgtggtggattacctggaagagcaatttgtacatcatcctgttctttttggacagaagttacaggatgcaatttaggc

SEQ ID NO: 1048 - DNA, 120 bp, Artificial Sequence
  Description of Artificial Sequence: Synthetic polynucleotide
aaaaaaaatcaggaccacgtgtcactaaattctgagtaccagtcaagaggctcaattgtcaccagttaggtccccgccttggcaaactgctgtaacattatacctgaagcagcagctggt

SEQ ID NO: 1049 - DNA, 120 bp, Artificial Sequence
  Description of Artificial Sequence: Synthetic polynucleotide
ctgtagtcccagctacttggaaggctgaggtgggaagatcacctgagcctggggaggtcaaggctgtagtcagtgtgccactgcactcccagcctgggtgagagcaagaccccgtctcca

SEQ ID NO: 1050 - DNA, 120 bp, Artificial Sequence
  Description of Artificial Sequence: Synthetic polynucleotide
gtactttgggaggctgaagcaggattgcttgagctcaggagttcgggagcctaggcaacatggctagaccacctctacaaaaaaacttcaaaaactacccaggtttggaggtgtgcatct

SEQ ID NO: 1051 - DNA, 120 bp, Artificial Sequence
  Description of Artificial Sequence: Synthetic polynucleotide
tttctgctaagttgaccaggatggttacagaaaaacatcctgtaagcatttctgtctcataagtaccacatcccatatccctcatgacctatatactacagaagatgcctgtaatcccag

SEQ ID NO: 1052 - DNA, 120 bp, Artificial Sequence
  Description of Artificial Sequence: Synthetic polynucleotide
ttttttttttgaccagtttgcattataaatatttatgactaggttttgaacaggagacaatctgtaagattcctgtctagactagaagtagaaaagctttattatacccagcgcagcatt

SEQ ID NO: 1053 - DNA, 120 bp, Artificial Sequence
  Description of Artificial Sequence: Synthetic polynucleotide
gggttcgggacagcctagttttgttagaggctgtattgtaggaaagcctacgtcggtatgtcaaacgctggaccattctgagtgcctgcagacaacgtccccggaagaggaagaaaaaag

SEQ ID NO: 1054 - DNA, 120 bp, Artificial Sequence
  Description of Artificial Sequence: Synthetic polynucleotide
ctttaggtcttacagcacgaacccctcgaagtctgcctgggcacacaccacatgcagattttggtgctttcccaaccttcttggtataaaggtaaacaattctattaccaggggttcggg

SEQ ID NO: 1055 - DNA, 120 bp, Artificial Sequence
  Description of Artificial Sequence: Synthetic polynucleotide
tgctcctcgataaggaaagcacgcttgatcctgtcacgaacacatttagcacacatggaaccaccataggccctgctgacatgtttctttgttttggacaatctcataagaactttaggt

SEQ ID NO: 1056 - DNA, 120 bp, Artificial Sequence
  Description of Artificial Sequence: Synthetic polynucleotide
ctttttctattggacagcgtcttttcatttttattactcaaaaaagtttcatttttttatttagctttctgactctgtgcttgtgccttcaacactttcacaacgattttctgctcctcg

SEQ ID NO: 1057 - DNA, 120 bp, Artificial Sequence
  Description of Artificial Sequence: Synthetic polynucleotide
tctcaccataacaatctcaagatgccaagcagacgtcactggatgcaaaactggaaagagatgcacacaactggctctctcaagctgaggtgaggtagctccagcacaccaactttttct

SEQ ID NO: 1058 - DNA, 120 bp, Artificial Sequence
  Description of Artificial Sequence: Synthetic polynucleotide
agtgatcatatactgtaacttgagtagtatctagggatgtgctggtagtatttaacctccagctctctgggggaaaacaggattttgcagcatttgctgaggtgtaaatactctcaccat

SEQ ID NO: 1059 - DNA, 120 bp, Artificial Sequence
  Description of Artificial Sequence: Synthetic polynucleotide
aaactctttacagaatcgaagtattaataagtacttataataacaatcaagtcattatcaaacatgtaccagatatatatcagagctcctggtaccaagagcatactatattagtgatca

SEQ ID NO: 1060 - DNA, 120 bp, Artificial Sequence
  Description of Artificial Sequence: Synthetic polynucleotide
cccctttgcaagatttttaattcttttcccttccattcatacagagaactggtcacatagagaactggattcaataaaaggctcattttggattttataaaatcaaaccctaaactcttt

SEQ ID NO: 1061 - DNA, 120 bp, Artificial Sequence
  Description of Artificial Sequence: Synthetic polynucleotide
aggtcgtccagctgtttcagcagctcctccttcttcttcccgcgaagatctcgagccttgatcttggccattgctgcacaagccgccaacgccgccgcccgctccgagggaaagaggaag

SEQ ID NO: 1062 - DNA, 120 bp, Artificial Sequence
  Description of Artificial Sequence: Synthetic polynucleotide
taataactgtgagaacacgggcaatggatttccggacgactcggatcttagagagcttggaggccgcaccgcctgtcactttggcgacgcgcagctgggacagctccaccttcaggtcgt

SEQ ID NO: 1063 - DNA, 120 bp, Artificial Sequence
  Description of Artificial Sequence: Synthetic polynucleotide
cctcgtgcttgttgagccggcggcgcatggcacgtgtcttcttaggccgcaggtccaggggcttgtacttcttgcccttgtagaatttcctgaggttttctttctgagtctggttaataa

SEQ ID NO: 1064 - DNA, 120 bp, Artificial Sequence
  Description of Artificial Sequence: Synthetic polynucleotide
gcagtctcagccagctgtgctttattgacaatgcgcccctcaggccttgaccgcgtacttccgcagcgggtacagccgctccttccgctgctgcttcttggtcttcaggttctcctcgtg

SEQ ID NO: 1065 - DNA, 120 bp, Artificial Sequence
  Description of Artificial Sequence: Synthetic polynucleotide
aaccgcgaggcaaacggaagtatataggaggttcccgatcgcacttcctcatgggagtcggtaggagcaatcatagagtgtaaggctcagcgcagcgccctcgggcggctgagaggactc

SEQ ID NO: 1066 - DNA, 120 bp, Artificial Sequence
  Description of Artificial Sequence: Synthetic polynucleotide
ctgtgtcactttatggggttggtgcttgccacacttcttacagaaagtccggcgggttttagggacgttaaccatgcttgcgtgagcgctatcggcgcggaaagaaagaaaccgcgaggc

SEQ ID NO: 1067 - DNA, 120 bp, Artificial Sequence
  Description of Artificial Sequence: Synthetic polynucleotide
tttagcctttttccggaaaatcggcttagtttgcccaccatagccactctgcttcctgtcataacgccgctttccctgggcgtacagagaatccttgcccttcttgtactgtgtcacttt

SEQ ID NO: 1068 - DNA, 120 bp, Artificial Sequence
  Description of Artificial Sequence: Synthetic polynucleotide
tcttatctcctcccagttcaaaatgcttgcatcttttaatagccagcattctcttagatctgcagttgggctcaacgcactcaagccttagcacaatcttctttgtagttttagcctttt

SEQ ID NO: 1069 - DNA, 120 bp, Artificial Sequence
  Description of Artificial Sequence: Synthetic polynucleotide
ccctcccaaaagatgaacagcaaacaaatgaagtgaacataaactcaagattttattgtcttcataataaaagatgacacttagaactggatcacttggccctttctcttcttatctcct

SEQ ID NO: 1070 - DNA, 120 bp, Artificial Sequence
  Description of Artificial Sequence: Synthetic polynucleotide
caacatatgatgtgaactcaaccagtcagcttcaatgcaaaacaagtagtaccagtaagaggcataaatttccccacaagcggaattgtattgatggctctagcttattccctcccaaaa

SEQ ID NO: 1071 - DNA, 120 bp, Artificial Sequence
  Description of Artificial Sequence: Synthetic polynucleotide
ccctattagcctgaaatgtgtctactcacatgataaccaataaccattgcataatgacaaactgcctcataaggcccctagtgattgaagtgccaaattagaaaattgcaacatatgatg

SEQ ID NO: 1072 - DNA, 120 bp, Artificial Sequence
  Description of Artificial Sequence: Synthetic polynucleotide
gaagaacaatgccaaaattctttattaaattaactgttataacaaagatctgacacttaactcttagcaaagacatctcatattcactatgaatgtgttactgacttctccctattagcc

SEQ ID NO: 1073 - DNA, 120 bp, Artificial Sequence
  Description of Artificial Sequence: Synthetic polynucleotide
cactttgtggcccttgttgaggcccacggccatagggtagcgtagggccatggctgctgctctccagagacggccgtggcggaagggctggcgccgcgcggaactccgggatatctactc

SEQ ID NO: 1074 - DNA, 120 bp, Artificial Sequence
  Description of Artificial Sequence: Synthetic polynucleotide
cggggcaaagccacacacctcccgaatcatgtcccgcacgaacttggtgtgtttggtcagacgcccgcggcgtcggctgtgcctgggcttgctcacgttcttggtcactttgtggccctt

SEQ ID NO: 1075 - DNA, 120 bp, Artificial Sequence
  Description of Artificial Sequence: Synthetic polynucleotide
ccgcttcctcttggcgcggatgtgcgtccccacccttttcttgataaatttgagggcccgtttgtccttggagaccttcagtaactccatggcgcgccgctcgtacggggcaaagccaca

SEQ ID NO: 1076 - DNA, 120 bp, Artificial Sequence
  Description of Artificial Sequence: Synthetic polynucleotide
ttttctgtcaagctgttctttatttcagggagagggcaggggaggggctcagtctttcttggcagcagctttcctcatggcggccagtacgttgctcagctcctcccgcttcctcttggc

SEQ ID NO: 1077 - DNA, 120 bp, Artificial Sequence
  Description of Artificial Sequence: Synthetic polynucleotide
gtatttaccgacgatcccgactttcttggtacgtttggccatgtcgccgcgacctaggtccgagcccagaaaggaagagacgcggtgcgcaggcgcggtattaggcggacgagcggaagt

SEQ ID NO: 1078 - DNA, 120 bp, Artificial Sequence
  Description of Artificial Sequence: Synthetic polynucleotide
tcatcttggttttgccacagaaagagcaagtgtacttggcgtgctggctgatttcaattttcttcaccattttccggagggaggccccatagcgggtcccgtatttaccgacgatcccga

SEQ ID NO: 1079 - DNA, 120 bp, Artificial Sequence
  Description of Artificial Sequence: Synthetic polynucleotide
gactttaccgtgacagcggaagtggtattgtacgtccaggcaccgccagccactgtcttcatgcaggaaccacagtgccagatccccacagctcgtctcttcatcttggttttgccacag

SEQ ID NO: 1080 - DNA, 120 bp, Artificial Sequence
  Description of Artificial Sequence: Synthetic polynucleotide
ttttgttacataaattaacccatttattataggccagtgatgtctcaaagagtagaggagcgtctactggtctttcaactccttcagtcttctgatggcggactttaccgtgacagcgga

SEQ ID NO: 1081 - DNA, 120 bp, Artificial Sequence
  Description of Artificial Sequence: Synthetic polynucleotide
gatgacgttcccttcgtcatctcgcttctgcggccgagaccagaaagaccggaagagaaggcacttccgctatatcacgctcagaagcttccgcccagggaagcacttcctgcggggcgc

SEQ ID NO: 1082 - DNA, 120 bp, Artificial Sequence
  Description of Artificial Sequence: Synthetic polynucleotide
cttgcgcttggcagggtagccacatttgccacaggtcgacttctgaaggtggtaggccttagagccacagcggcggcacaacgtgtgcgtcttattgcgacgctttccaaacgatgacgt

SEQ ID NO: 1083 - DNA, 120 bp, Artificial Sequence
  Description of Artificial Sequence: Synthetic polynucleotide
ttccttcacggaatccatgcctgaatctgcggtatacaatttttaggtgcctcattcgaccagttccggtggtatttcgtcttttagccttggcactccagttatactttctcttgcgct

SEQ ID NO: 1084 - DNA, 120 bp, Artificial Sequence
  Description of Artificial Sequence: Synthetic polynucleotide
caaaaccagatatgtattttttaaaaccagaacatttattgcatgactaatcgttgacattcttaagatgaactggatgctgcaacagctgccctcttgggtttaggtgttgttccttca

SEQ ID NO: 1085 - DNA, 120 bp, Artificial Sequence
  Description of Artificial Sequence: Synthetic polynucleotide
aacattccaaaacagtcacttaacaagtaaatctgatatgaagctagcccagtccctaaacctacagtatttcactgatactacaagcctaattgattaaaaataccttaccaaaaccag

SEQ ID NO: 1086 - DNA, 120 bp, Artificial Sequence
  Description of Artificial Sequence: Synthetic polynucleotide
gtgctattttaatctgctatattgtcttccagtgccctctgcttcaaggactcctggaattctgcttgtttctcattgcctttaaccgtgttacaaacccagtccaaaagtaaacattcc

SEQ ID NO: 1087 - DNA, 120 bp, Artificial Sequence
  Description of Artificial Sequence: Synthetic polynucleotide
ccccctagtcatgacagcatagcagatgaacatgttgctaaaggtaatttaaacatcatactctttcaaatttactcaaacatctaaaatacccacctatgccacatgagctgtgctatt

SEQ ID NO: 1088 - DNA, 120 bp, Artificial Sequence
  Description of Artificial Sequence: Synthetic polynucleotide
gtgagcattacagatactaggataagatcatcttttgaaaaacagaagccacctaaactcctacccatacgtttccagtggtactcccaagctctatgtgactaataatcatccccctag

SEQ ID NO: 1089 - DNA, 120 bp, Artificial Sequence
  Description of Artificial Sequence: Synthetic polynucleotide
agccctactttttctcaaacctatttacatattcttaagttgactcacacctagcaggcttttttcacttagctagccaccttacacacagcccacaagtcaggtgtgccaagtgagcat

SEQ ID NO: 1090 - DNA, 120 bp, Artificial Sequence
  Description of Artificial Sequence: Synthetic polynucleotide
gagggctaaaaaaattcgaccaagtagtcccacatcattgcctttagtctacaaatctcagggattatacttgattttcctttatttcctgctcaatctttacttgcacccaagccctac

SEQ ID NO: 1091 - DNA, 120 bp, Artificial Sequence
  Description of Artificial Sequence: Synthetic polynucleotide
cattttaaaaaaacaaaaaaaacccccaaccctgtcaataaaccacgaaaactaggaaggcacgacagcaagtttcagtgctttaacacagaaacacccaattaccaagttgagggctaa

SEQ ID NO: 1092 - DNA, 120 bp, Artificial Sequence
  Description of Artificial Sequence: Synthetic polynucleotide
ttaaatagcatgacttggctacatcactattttatgtagctgttccagcaattcatgttcccttcaactgcccctgccctctcactcagcagtccagttgactttgtcccttcattttaa

SEQ ID NO: 1093 - DNA, 120 bp, Artificial Sequence
  Description of Artificial Sequence: Synthetic polynucleotide
caattagctagcacattataaagccattccaggttacaagtaaaagtgatacccttccaaggccaggttaagaacctcagatgttattctaaacacagtggagaattataatttaaatag

SEQ ID NO: 1094 - DNA, 120 bp, Artificial Sequence
  Description of Artificial Sequence: Synthetic polynucleotide
ttttgggaggaagcccaagagagatttaatcagcagggtttctttataagtgaatgttctgaagctgagacctgaagggtaaattaggagttaaaatacaagatgagagtagcaattagc

SEQ ID NO: 1095 - DNA, 120 bp, Artificial Sequence
  Description of Artificial Sequence: Synthetic polynucleotide
ggcgcgctgggctctggcgcggaccaggacctttctcacccacgtatcaccctagagacactcacagcaagcagcaaccggggaaaaggacgaaaaagaacgagacttccgtttccgggc

SEQ ID NO: 1096 - DNA, 120 bp, Artificial Sequence
  Description of Artificial Sequence: Synthetic polynucleotide
tttttcttgatcttgacagatttggcatcctttcgtcgggctgtgagcaggaagtccttgatttcctcaattttccgaggcatggcgacgaggcgcgctgggctctggcgcggaccagga

SEQ ID NO: 1097 - DNA, 120 bp, Artificial Sequence
  Description of Artificial Sequence: Synthetic polynucleotide
ctgcttcagtttctctgccttctctttgtcagtgatgaccagggtgtaaaggtatctgctgcatcgaactttaaacttcacgttgtccttatttttcttgatcttgacagatttggcatc

SEQ ID NO: 1098 - DNA, 120 bp, Artificial Sequence
  Description of Artificial Sequence: Synthetic polynucleotide
tttaggatttttagtattttaatataatacagttccaatcagtgtgtctggttcatttcagttccttcactgccaaaccggggggcagggactgcttcagtttctctgccttctctttgt

SEQ ID NO: 1099 - DNA, 120 bp, Artificial Sequence
  Description of Artificial Sequence: Synthetic polynucleotide
ggaatcgcttaatcctgaaagtcttgtgagaagacatggcgagcagcggagtcaagaacacaccacgatggcggagaaaggaagaggagggaagctggcggaagaacgagcttagaaggc

SEQ ID NO: 1100 - DNA, 120 bp, Artificial Sequence
  Description of Artificial Sequence: Synthetic polynucleotide
cttctccaatgtctccttttggagttgtacctgattttatttccagttttcatccgaatccactggggaatgggacgattttgcttttgtttcttggccaggaatcgcttaatcctgaaa

SEQ ID NO: 1101 - DNA, 120 bp, Artificial Sequence
  Description of Artificial Sequence: Synthetic polynucleotide
gtgacattttcagcttgatatggtaacatgatcgtgaccttcagacagcataaatatgtgtgccatctcatgtgcaattccttatagacccagcttggttcttctccaatgtctcctttt

SEQ ID NO: 1102 - DNA, 120 bp, Artificial Sequence
  Description of Artificial Sequence: Synthetic polynucleotide
tttaaaaagaaaggccttacatatttattactgaatccagccaaccaacgtgttcataacagattcagagaggaaaacacgtcgaaatctccagatagtggtgacattttcagcttgata

SEQ ID NO: 1103 - DNA, 120 bp, Artificial Sequence
  Description of Artificial Sequence: Synthetic polynucleotide
gcaggaagccgagggacccatgtctgggagcggagaactttctgtgagacatcacgccatcaaatcccgccggtagaggccggtcggccttacgggtccgctatataaagccaaatctgg

SEQ ID NO: 1104 - DNA, 120 bp, Artificial Sequence
  Description of Artificial Sequence: Synthetic polynucleotide
gagtcatgccagccttgtatcccaggaaggctgtgaggtggaccggcttggacgggtcatccttagggaagctcttcaccttcccacgatgcctgctgctgcgcttccgaggcaggaagc

SEQ ID NO: 1105 - DNA, 120 bp, Artificial Sequence
  Description of Artificial Sequence: Synthetic polynucleotide
agcccacaatgcccacaaccaccatgggtggtgtctctacaatggtcacagcctccaccacctccttcttgttcaccttggatcccggcctgtcgacttcccgcacgatgtgagtcatgc

SEQ ID NO: 1106 - DNA, 120 bp, Artificial Sequence
  Description of Artificial Sequence: Synthetic polynucleotide
ccttcttcttagatttatgccaattcttatagaaacgcctcttgcattcatcactgatgtgctcagcaaagacagtcttgaaggtccggaggcctcgaggggtttccacgtagcccacaa

SEQ ID NO: 1107 - DNA, 120 bp, Artificial Sequence
  Description of Artificial Sequence: Synthetic polynucleotide
tgtgggcaatgacacggatgacttggcagtacttcttcatgctgctgaagtccttctccagctgcttcttgccatcctcatcctgccatttcttgcagtacttggtaaaggccttcttct

SEQ ID NO: 1108 - DNA, 120 bp, Artificial Sequence
  Description of Artificial Sequence: Synthetic polynucleotide
gctcaagcctctcgcgggcccagtccagcttctcggccacagtgcctccgttcacctggatctccatcaggtgggccttcttctggcgcagaggaagcaggcgcatctgggtgtgggcaa

SEQ ID NO: 1109 - DNA, 120 bp, Artificial Sequence
  Description of Artificial Sequence: Synthetic polynucleotide
cttcttggtgtgccaacgactggtgacccctttgtagcctttgcccttggtcaccccgatgacgtcgatcatctcatcctgcccaaacacttggttcacaggtacctgctgctcaagcct

SEQ ID NO: 1110 - DNA, 120 bp, Artificial Sequence
  Description of Artificial Sequence: Synthetic polynucleotide
gtgatggtagcctttctgcccagcgcgtgccacagagaaggctacacgagcaggatgccatgccccaatacaggccaccttgcgcaggcctcggtgggtcttgcggggcagcttcttggt

SEQ ID NO: 1111 - DNA, 120 bp, Artificial Sequence
  Description of Artificial Sequence: Synthetic polynucleotide
gctcttgtcagataggtcatagtcagtggaggcattgttcttgatcagcttgccgtccttgataaggtagccctggccaatcttataaatcttcttgttgatctcagtgcggtgatggta

SEQ ID NO: 1112 - DNA, 120 bp, Artificial Sequence
  Description of Artificial Sequence: Synthetic polynucleotide
ggacttgcggagggtgagcacccgcttcttggttcccaccacacagcctttcagcatgacaaagtcattggtcacttcaccatagtggacaaagccacccagagggttgatgctcttgtc

SEQ ID NO: 1113 - DNA, 120 bp, Artificial Sequence
  Description of Artificial Sequence: Synthetic polynucleotide
tgctttcttctcctccatggtctggaagcggccatggccaaacttggaggtggtgtcaatgaacttaaggtcaatcttctccagagcccgccgcttcgtctgcaccagcaaggacttgcg

SEQ ID NO: 1114 - DNA, 120 bp, Artificial Sequence
  Description of Artificial Sequence: Synthetic polynucleotide
tttgtcagtggaaaataacttttattgagaccccaccaactgcaaaatctgttcctggcattaagctccttcttcctttgcaattcggtctttcttcagtggtcccatgaatgctttctt

SEQ ID NO: 1115 - DNA, 120 bp, Artificial Sequence
  Description of Artificial Sequence: Synthetic polynucleotide
gcctgcgcattcgcttcttcctccacttggctctcatggcgcagaggtttccaaaaaaatggcgctaaggccgagagaaaggcgaagttccgtctacggctatttaatggagcgccgggt

SEQ ID NO: 1116 - DNA, 120 bp, Artificial Sequence
  Description of Artificial Sequence: Synthetic polynucleotide
cttgtaccagcatccccagcgtctggcattccatgtttctgctcctgtggcctccacggtgcaacaagctagcggtttacttggacctctgcctcatctttcttcttttgcgcttcagcc

SEQ ID NO: 1117 - DNA, 120 bp, Artificial Sequence
  Description of Artificial Sequence: Synthetic polynucleotide
aacatgggcattttgtttatgagcaaggtgggtctcagaggtgatcggcgatcagagggcgatgaagttctagatccattgagacaagctctagacagtagcatgcagtcccacaacttg

SEQ ID NO: 1118 - DNA, 120 bp, Artificial Sequence
  Description of Artificial Sequence: Synthetic polynucleotide
ttgatttaattcttcagctaaaacagcggaagaggtgatttattatatggttgttacactcggccacaaataaacacagaaatagtccagaatgtcacaggtccagggcagaggaccaac

SEQ ID NO: 1119 - DNA, 120 bp, Artificial Sequence
  Description of Artificial Sequence: Synthetic polynucleotide
cagatgactcccccttttcggagtacaccgatatcagtgggcgagcacacgccatggcggagagaggagacagccacgctcctctcagcccggctgctgccacaggaaaaggaagtgctt

SEQ ID NO: 1120 - DNA, 120 bp, Artificial Sequence
  Description of Artificial Sequence: Synthetic polynucleotide
ctgctaattcactgacagcatagggctgtctgttgtttttgcgcaagttggtgtgaacaaagttcacaatatctggtcgaataggagccttgaatacagcaggcaaagtgacatttttgc

SEQ ID NO: 1121 - DNA, 120 bp, Artificial Sequence
  Description of Artificial Sequence: Synthetic polynucleotide
ctccacgacacatgtttccaaaagcaccctggccagagcggtgagtcccaccacctcgaactctgggaattcgagccacagctctgccagtaccccaagactcagcactagtctgatgac

SEQ ID NO: 1122 - DNA, 120 bp, Artificial Sequence
  Description of Artificial Sequence: Synthetic polynucleotide
acatgaccagtgctggtagggctgaggcagccagggcagaacagatggcgtatcgtttttgggttgtgttcactctacgatgccaacggcgccaggttttggttggtgcaaacattcggc

SEQ ID NO: 1123 - DNA, 120 bp, Artificial Sequence
  Description of Artificial Sequence: Synthetic polynucleotide
cattccaggctttaagtttcttaaggagcaaaacagcttccttggtcttcttgtagccttcaactttatcttcaactaccaaaggaagttcaggaacttcctcaatacgatgacctttag

SEQ ID NO: 1124 - DNA, 120 bp, Artificial Sequence
  Description of Artificial Sequence: Synthetic polynucleotide
tgatgataccattatcctcattatagatgatgcacgggcccctgcgctggatacggcgacggtttctcattttgcctttgccagctctcattcgctgagaggcatagacctttttgatat

SEQ ID NO: 1125 - DNA, 120 bp, Artificial Sequence
  Description of Artificial Sequence: Synthetic polynucleotide
tccggaaagcactttcagtccaaatgcagaaacgtcccacatgcccaccaggagcaagcttcaaaatgttcagcttgcttacattaagcagagtaattccagggatgtttctgaaggcct

SEQ ID NO: 1126 - DNA, 120 bp, Artificial Sequence
  Description of Artificial Sequence: Synthetic polynucleotide
ggatctctgggcttttcaagattctgctaagatctgtattaatcatcttgtgcatgggaagattgtagttactcttgagggaagcggctttacgccaagtgccgtacaattcatctaact

SEQ ID NO: 1127 - DNA, 120 bp, Artificial Sequence
  Description of Artificial Sequence: Synthetic polynucleotide
tgttccggcgcatggtctttgcatatgggtttagcttcaacatgattctcaagtttttcagtgggttcttctttaggactctgcgatggatcttcttgcgtggtgctcgaagggctcttt

SEQ ID NO: 1128 - DNA, 120 bp, Artificial Sequence
  Description of Artificial Sequence: Synthetic polynucleotide
ctaccacaggcttcttgcctgcaaccgccgccttctcatctgatttggcttgtagtgccgctgctgcagcagctgccttatccacccggagcttgtgattcctggcctggcgaagaatgg

SEQ ID NO: 1129 - DNA, 120 bp, Artificial Sequence
  Description of Artificial Sequence: Synthetic polynucleotide
taggtttcttctctgcaggcttcttttcaggggctggtttcttggtagctgctgccttttttcccaccagaggcttcttctgcttcttaacaccaacagcagccttctttcctttcttac

SEQ ID NO: 1130 - DNA, 120 bp, Artificial Sequence
  Description of Artificial Sequence: Synthetic polynucleotide
catgtttctcactgcctgtataatcaggtctttattcaaaagaagctgtccaaaatgatttgacctttatggaataatcaaatttaagagtttatgcagcaggcttcttctcctctgtag

SEQ ID NO: 1131 - DNA, 120 bp, Artificial Sequence
  Description of Artificial Sequence: Synthetic polynucleotide
cttaaagtaggccttattcttaacaactttaacaaaccccatcctgcggaacagagaccggcgtccgctgctcgacagagacctgcaggcccagcggcgctagggggtgggaaaagggcc

SEQ ID NO: 1132 - DNA, 120 bp, Artificial Sequence
  Description of Artificial Sequence: Synthetic polynucleotide
tatcatcctgtatttgggtgtgttgtatttatttttatcttgtatcaccaagcgtttccgagcataataatcagttttaccctctcgtcgtcttctaaatttcacttggtatctcttaaa

SEQ ID NO: 1133 - DNA, 120 bp, Artificial Sequence
  Description of Artificial Sequence: Synthetic polynucleotide
caaccttcacaccatattttggcagttcgtgtgcatacgctgcgcagactatcatatccccctctatacgggcataagcaatctgacaaatgatatctctgtttgtcacacgaactatca

SEQ ID NO: 1134 - DNA, 120 bp, Artificial Sequence
  Description of Artificial Sequence: Synthetic polynucleotide
catcaccagtcacctccacttggccttcatagatcttgtccatgccaaacctattgagaagcctgcgggccagcagcaggccagtacaatatgctgcagcataatttgtcaggccaacct

SEQ ID NO: 1135 - DNA, 120 bp, Artificial Sequence
  Description of Artificial Sequence: Synthetic polynucleotide
cagctcccttcagggcaccaaaaactttattgccagtggtagttctggcaaggcctgcatccaaatagcaggtgaaggcacctggctgaccatcaatgctttccacattgtattcatcac

SEQ ID NO: 1136 - DNA, 120 bp, Artificial Sequence
  Description of Artificial Sequence: Synthetic polynucleotide
gcaacattctggcccatgatgtgcttccgatgtacttctgcattaaattccttgctttcagaatcataaccagggaatcgtttggtactgtgagggatagacaagcctccatccacagct

SEQ ID NO: 1137 - DNA, 120 bp, Artificial Sequence
  Description of Artificial Sequence: Synthetic polynucleotide
gctttcttatacatctcctccatcatgtctggagttacgctgttctttatgtattgagagaactgtttcttgtaagcatcttcatcttcttccattaagtagcgcatgtaatctgcaaca

SEQ ID NO: 1138 - DNA, 120 bp, Artificial Sequence
  Description of Artificial Sequence: Synthetic polynucleotide
agctacccgatccttcttctgagcaagggacattttgggacggttccacctcttctttttaacttctttcttgggcttcttttcatagactggattctctcgtatagcagcatgagcttt

SEQ ID NO: 1139 - DNA, 120 bp, Artificial Sequence
  Description of Artificial Sequence: Synthetic polynucleotide
tttttagttgctgttcataagtttattatctatatctgaaaaaatcatagaaaattgctgggtttagctctcagcagcccgctcctgagctctgaggaagcttgccttcttttgagctac

SEQ ID NO: 1140 - DNA, 120 bp, Artificial Sequence
  Description of Artificial Sequence: Synthetic polynucleotide
catcaaccttcttggcttcgggtttcttctctttagtatctggcttctcaactttttcacccgccatcttgcaagatgggaaagagaattaaggtcccggcttccggtctataagcaatc

SEQ ID NO: 1141 - DNA, 120 bp, Artificial Sequence
  Description of Artificial Sequence: Synthetic polynucleotide
acatggcagatcgggaatacctgccaattcctctgacaaggacagggttgcggctgcaatggggcttccccttcttgggctttttagctttgaggttaccctttttcaccttgccaccag

SEQ ID NO: 1142 - DNA, 120 bp, Artificial Sequence
  Description of Artificial Sequence: Synthetic polynucleotide
cgccgttcttgtcaccaccaactggttttgtaacagttgcgagaaccttctccttctttttcttttcaaccttggatttagcggctgagtacttcctcttgtacatggcctttctggaat

SEQ ID NO: 1143 - DNA, 120 bp, Artificial Sequence
  Description of Artificial Sequence: Synthetic polynucleotide
tggctcgcagttttctcacgtgctgactgaagggttttttgccgtggctcaacagctttcgaggcacatcttcagtaggataatatctaggcattttgcgaagtttaaccacccgggtac

SEQ ID NO: 1144 - DNA, 120 bp, Artificial Sequence
  Description of Artificial Sequence: Synthetic polynucleotide
gattgaggaccagaggtccagtcacaagtaataagccactagccagctgcttcaggaaaaccaccctcttgcccctgtggcgtccagtgaggatgatcagaatggtcccgggggtaatgc

SEQ ID NO: 1145 - DNA, 120 bp, Artificial Sequence
  Description of Artificial Sequence: Synthetic polynucleotide
gcagcttcttcttcttgaagtaagcatcagtaagatgttttgggatttttacattgctgatatcgattttggttgaagtggcaatgacaaatttctggtgtgttcttcgtagaggaactc

SEQ ID NO: 1146 - DNA, 120 bp, Artificial Sequence
  Description of Artificial Sequence: Synthetic polynucleotide
ctttgatttttggtaaaatttgtgagtccacagctttctgatcaatcttgcgctgctccgtaatctcatatttctctttttctgtgtcgaagatctcaccttcctggtgtctgggcttcc

SEQ ID NO: 1147 - DNA, 120 bp, Artificial Sequence
  Description of Artificial Sequence: Synthetic polynucleotide
tttttttgtagtcagctatttaattaggttcttaagacatttagaacaccaatttgtgaggataaattccattcgtcagagcaaacacagatcgcaggtagccctggagctgaggaatag

SEQ ID NO: 1148 - DNA, 120 bp, Artificial Sequence
  Description of Artificial Sequence: Synthetic polynucleotide
gggattcaccactttcttagcctcctgcttcttcacgacagctggggccggagccaccttctttcccttggccttctttcctttcggcatcttgggcggcgggaggagagagaaaggaaa

SEQ ID NO: 1149 - DNA, 120 bp, Artificial Sequence
  Description of Artificial Sequence: Synthetic polynucleotide
ctctgccgctgcaacctgatatagcggggccatttcacaaagcgggtgaggtctcttttgggctggatgtcctgtccaatgccaaaattcttaggccttttctcaaacaggggattcacc

SEQ ID NO: 1150 - DNA, 120 bp, Artificial Sequence
  Description of Artificial Sequence: Synthetic polynucleotide
gtctgtacttgtgggccagcttaagcagctgagtagctgtttggcggtccagggcctgggtgaactggttaatcgcaggaggcactttcagccgcttatagaggatggctctctgccgct

SEQ ID NO: 1151 - DNA, 120 bp, Artificial Sequence
  Description of Artificial Sequence: Synthetic polynucleotide
aactcctgctcgaaggacaggtggtctcttcgttgggacgtcccctttgccagcagccttcttctcggcccgggccaacagtctctgcttcttctcttgctttgtctctggtctgtactt

SEQ ID NO: 1152 - DNA, 120 bp, Artificial Sequence
  Description of Artificial Sequence: Synthetic polynucleotide
attttacgacacagggcaggcaagaagacaaccagctcgatgggatccacgtcgtgtgcaatcaccaccagctgagctttcttgttctccaccaaggtggtgacggtgttaactcctgct

SEQ ID NO: 1153 - DNA, 120 bp, Artificial Sequence
  Description of Artificial Sequence: Synthetic polynucleotide
cgcctttgtcttccgagttcacctgtgtgaaggcgacagtggtgcaggtcttcctgtggactagacgtcccagtcttgcctttcccttgataatgcagtaagggacccccattttacgac

SEQ ID NO: 1154 - DNA, 120 bp, Artificial Sequence
  Description of Artificial Sequence: Synthetic polynucleotide
gatacgagccacagacttaggacccaggacattgccaccccagtgacggcggatctcatcgtatctgtcattgtaattggtcctgatagcttccaccagcttagccaaagcgcctttgtc

SEQ ID NO: 1155 - DNA, 120 bp, Artificial Sequence
  Description of Artificial Sequence: Synthetic polynucleotide
gaaggaaaatttgtattatttcaattatttttatgtacagaaaactcaacagtgtacatttaacccagtttagtggcaagttctttagcctttgccttttcgagcttggcgatacgagcc

SEQ ID NO: 1156 - DNA, 120 bp, Artificial Sequence
  Description of Artificial Sequence: Synthetic polynucleotide
aggcgcttgatcttcagctctgcgaaattccttcgctttttcttaagggtttctggcacagcaggaacctccttcttcttctcttctacaccctccatggttccagccggaaaaagagga

SEQ ID NO: 1157 - DNA, 120 bp, Artificial Sequence
  Description of Artificial Sequence: Synthetic polynucleotide
ctcgccattcgaatttcagttctgtacatctgcctatattccttgtgatagtgctttgctttttcatagataagcttcctccttgcctttcgaagcatcttttgggcaaacttctttctc

SEQ ID NO: 1158 - DNA, 120 bp, Artificial Sequence
  Description of Artificial Sequence: Synthetic polynucleotide
cgaagaagctgcaacacctttcgaacctttgggctcactccattgatacctctgattctgatgacaaacgccaatttgggttctgcaggtacatagaagttgccagcttttcttgccatc

SEQ ID NO: 1159 - DNA, 120 bp, Artificial Sequence
  Description of Artificial Sequence: Synthetic polynucleotide
agttcatttactgacttcagattggggtacccccatgcaatatatggctctacaatcctcagcatgttaatcgaagccttgttgagcttcacaaaggttccattgaagatttgacgaagg

SEQ ID NO: 1160 - DNA, 120 bp, Artificial Sequence
  Description of Artificial Sequence: Synthetic polynucleotide
tcatgaatcaaatcctccatgcagatgatgccgtatttaccaagagatcgagcaatcaaagcgttatctgtcaaagcaattcgcttcttattgattttgccataaccacgcttgtagatt

SEQ ID NO: 1161 - DNA, 120 bp, Artificial Sequence
  Description of Artificial Sequence: Synthetic polynucleotide
gcatctccaccttctacaaaatgggtggtctttttcttcattccacctcgtggagaagacaatttgaagggccacaggaagttatttgcctctttgaagcgttttccaacagtatagatc

SEQ ID NO: 1162 - DNA, 120 bp, Artificial Sequence
  Description of Artificial Sequence: Synthetic polynucleotide
ttttatttcaatttgagagcaggtactgtttattaaccaaccagcttagaaaaataatcatggtagacaccttagttcattcttctaataagcctgttgatctggtcctccctgttgcca

SEQ ID NO: 1163 - DNA, 120 bp, Artificial Sequence
  Description of Artificial Sequence: Synthetic polynucleotide
cgcgcggaacacagacccggcgcccttcctctgtccacggatcacacggcccatggcgacgggtcctgttcaccagcgcggccgaaagaggaaacacggcgtcagcgagcggccttatct

SEQ ID NO: 1164 - DNA, 120 bp, Artificial Sequence
  Description of Artificial Sequence: Synthetic polynucleotide
gcggcccgggtcgtggatgatgtccttgacgatgcccttgatgtagccgtgccgctcagcgaaatccacggcgcgcaggcgcgcagcgcctttacggtgcttcacgtgcgcgcggaacac

SEQ ID NO: 1165 - DNA, 120 bp, Artificial Sequence
  Description of Artificial Sequence: Synthetic polynucleotide
gcaatacacaaactggcccgtgtgaatgccctcggcggcaatgaacagctccgtccgcttcttaaaccgatacggatcccggaagaccaccttggcgaggggcgcgccgcggcccgggtc

SEQ ID NO: 1166 - DNA, 120 bp, Artificial Sequence
  Description of Artificial Sequence: Synthetic polynucleotide
cagcttgccacggtctccaggcttctcctccaggcagcacacgattgtaccctcaggcatggtgcccacagggagcacattgccaatgttgagctgggccttcttgccgcaatacacaaa

SEQ ID NO: 1167 - DNA, 120 bp, Artificial Sequence
  Description of Artificial Sequence: Synthetic polynucleotide
gttggctgaggagataaccttcttggagccggagggcagcttcacacgggtcttcttggtctcagggttgtgggagataacggtggcatagttccctgatgcccgggccagcttgccacg

SEQ ID NO: 1168 - DNA, 120 bp, Artificial Sequence
  Description of Artificial Sequence: Synthetic polynucleotide
tcgtggccagcagttcctctttgccttatatttgtggtacgcccggccagccttcaagatgggtttgtcaattcggccacctccagccaccacaccaaccacagctctgttggctgagga

SEQ ID NO: 1169 - DNA, 120 bp, Artificial Sequence
  Description of Artificial Sequence: Synthetic polynucleotide
tttgcggccagcaggggcatctctgcggatggtggagggcttgccgatgtgctggtggttgccacctccaaaaggatgctccacaggattcatggccacaccccgtactcgtggccagca

SEQ ID NO: 1170 - DNA, 120 bp, Artificial Sequence
  Description of Artificial Sequence: Synthetic polynucleotide
ttggcataaacacaaactttattgaggccctcagcactagttctctttctcctgcacagtcttggttccccggagacgtccagtccggcgggcagcaatgagacccactttgcggccagc

SEQ ID NO: 1171 - DNA, 120 bp, Artificial Sequence
  Description of Artificial Sequence: Synthetic polynucleotide
tcagagtaatgtcgacattttctggaatgtcgacagtctgattgctgagaatagtcttcattctcgcagtagacgcagcaaagaaagaacgtctgtcgtcattacgtacttgtatcgcgt

SEQ ID NO: 1172 - DNA, 120 bp, Artificial Sequence
  Description of Artificial Sequence: Synthetic polynucleotide
ggagcctcttttttttctttccaagaaggctgagttctacattgatgtgattgaagtccctccgcagggttcctctggggcccttcacgataactgtgcgtcccttcagagtaatgtcga

SEQ ID NO: 1173 - DNA, 120 bp, Artificial Sequence
  Description of Artificial Sequence: Synthetic polynucleotide
tgtaacggaagcccagtgtaacacccttgatcatgttctgtacatgactacaaatagtccgaacggtagccagttcctttctgttaccccaccatttgtcaacccggagcctcttttttt

SEQ ID NO: 1174 - DNA, 120 bp, Artificial Sequence
  Description of Artificial Sequence: Synthetic polynucleotide
ccctgcggatatatttttcacccaagaaatttcggatttcaacaagagacccattctcctggataacaacgttgatggggaagtgagcatacacagacctcatcttgtaacggaagccca

SEQ ID NO: 1175 - DNA, 120 bp, Artificial Sequence
  Description of Artificial Sequence: Synthetic polynucleotide
tcaaagccgctgaatttgaaacaagctcaatgtcatttccttcaaggattaattcatctttctgggcttgagatactgaacaagcaacacctggtctcatccgaaccctgcggatatatt

SEQ ID NO: 1176 - DNA, 120 bp, Artificial Sequence
  Description of Artificial Sequence: Synthetic polynucleotide
ttagatcttattcatcagcctgctgaacagttcctttttcagagacatagataccatccaaaaatttcctgatatccttgtttttaactgttgtggcttgctgaatcaaagccgctgaat

SEQ ID NO: 1177 - DNA, 120 bp, Artificial Sequence
  Description of Artificial Sequence: Synthetic polynucleotide
tttaagaagaaggtccaaatcaataggtcttttattgcatcatttaaatatcacaagtaggtcttaagtgtcatctggcatcttctttctgtagccaggtaactcttagatcttattcat

SEQ ID NO: 1178 - DNA, 120 bp, Artificial Sequence
  Description of Artificial Sequence: Synthetic polynucleotide
ggacgcctggcgagagaagggcctcgcgcccgcgcgtgccttttataatgcgaacaaagtagccaatcagaaaccgcggatagcgctcctgtctattggctgcgccatcgcccgtcagac

SEQ ID NO: 1179 - DNA, 120 bp, Artificial Sequence
  Description of Artificial Sequence: Synthetic polynucleotide
tgatcttaaggaagtagttggacttccaggtcgccctgtcttccctgggcatcacggcggtgcgtcagggattgccacgcagggtttaaagacgatgtcacttccacgaggacgcctggc

SEQ ID NO: 1180 - DNA, 120 bp, Artificial Sequence
  Description of Artificial Sequence: Synthetic polynucleotide
agcaccacagccttcccgcgaagggacatgcggatctgctgcatctgcttggagcccacattgtctgctcccacaatgaaacatttcggataatcatccaatagttggatgatcttaagg

SEQ ID NO: 1181 - DNA, 120 bp, Artificial Sequence
  Description of Artificial Sequence: Synthetic polynucleotide
gaacacaaagcccacattcccccggatatgaggcagcagtttctccagagctgggttgttttccaggtgccctcggatggccttgcgcatcatggtgttcttgcccatcagcaccacagc

SEQ ID NO: 1182 - DNA, 120 bp, Artificial Sequence
  Description of Artificial Sequence: Synthetic polynucleotide
tctgggctggcacagtgacttcacatggggcaatggcaccagcacgggcagcagctggcaccttattggccagcaacatgtccctgatctcagtgaggtcctccttggtgaacacaaagc

SEQ ID NO: 1183 - DNA, 120 bp, Artificial Sequence
  Description of Artificial Sequence: Synthetic polynucleotide
gtcttgatcagctgcacatcactcaggatttcaatggtgcccctggagattttagtggtgatacctaaagcctggaaaaaggaggtcttctcgggcccgagaccagtgttctgggctggc

SEQ ID NO: 1184 - DNA, 120 bp, Artificial Sequence
  Description of Artificial Sequence: Synthetic polynucleotide
gtagatgctgccattgtcgaacacctgctggatgaccagcccaaaggagaagggggagatgttgagcatgttcagcagcgtggcttcgctggctcccactttgtctccagtcttgatcag

SEQ ID NO: 1185 - DNA, 120 bp, Artificial Sequence
  Description of Artificial Sequence: Synthetic polynucleotide
atgcaacagttgggtagccaatctgcagacagacactggcaacattgcggacaccctccaggaagcgagaatgcagagtttcctctgtgatatcaagcacttcagggttgtagatgctgc

SEQ ID NO: 1186 - DNA, 120 bp, Artificial Sequence
  Description of Artificial Sequence: Synthetic polynucleotide
ggatcagccaagaaggccttgaccttttcagcaagtgggaaggtgtaatccgtctccacagacaaggccaggactcgtttgtacccgttgatgatagaatggggtactgatgcaacagtt

SEQ ID NO: 1187 - DNA, 120 bp, Artificial Sequence
  Description of Artificial Sequence: Synthetic polynucleotide
gtccgactcctccgactcttccttggcttcaaccttagctggggctgcagcagcagcaggagcagctgtggtggcagcagccacaggggcagcagccacaaaggcagatggatcagccaa

SEQ ID NO: 1188 - DNA, 120 bp, Artificial Sequence
  Description of Artificial Sequence: Synthetic polynucleotide
ttttttactttttaaagaagtaagcctttatttccttgttttgcaaataaaactggctaagttggttgctttttggtgattagtcaaagagaccaaatcccatatcctcgtccgactcct

SEQ ID NO: 1189 - DNA, 120 bp, Artificial Sequence
  Description of Artificial Sequence: Synthetic polynucleotide
gagtgtagggctggcgctgccggacgcggtgctagtcgccggatgaagtgagggcctcaccccaacgcagccttagcttcctcggaaggaccgagcaccttggcggcagctgaggaaagg

SEQ ID NO: 1190 - DNA, 120 bp, Artificial Sequence
  Description of Artificial Sequence: Synthetic polynucleotide
gcattgatcttatcctccgtgactgtcacctcatcgtcgtgcagaatgagggccgagtagatgcaggcgagctcggagacagaggccatggcgcgggcgagtgtagggctggcgctgccg

SEQ ID NO: 1191 - DNA, 120 bp, Artificial Sequence
  Description of Artificial Sequence: Synthetic polynucleotide
cattgcagatgaggctcccaatgttgacgttggccagggcctttgcaaacaagccaggccaaaaaggctcaacatttacaccggctgctttaatgagggcattgatcttatcctccgtga

SEQ ID NO: 1192 - DNA, 120 bp, Artificial Sequence
  Description of Artificial Sequence: Synthetic polynucleotide
ttccactttcttctcctcagctggagcagcagcagtggagggggcaggacctcctgctggtgcagcaccagctgctggagcaggtccaccggcccctacattgcagatgaggctcccaat

SEQ ID NO: 1193 - DNA, 120 bp, Artificial Sequence
  Description of Artificial Sequence: Synthetic polynucleotide
aaagttcagctttttattgaacatgttataaaagaggtttagtcaaaaagaccaaagcccatgtcatcatcagactcctcggattcttctttctttgcttccactttcttctcctcagct

SEQ ID NO: 1194 - DNA, 120 bp, Artificial Sequence
  Description of Artificial Sequence: Synthetic polynucleotide
ggcgacgtagcgcatcgcggcggcgtctgcggcggaggcggcggagaagtctcacgcgtgcgacctcggtggcgacagggaggaaaaggaaggcgccgacgcaagaggcggggttaaacc

SEQ ID NO: 1195 - DNA, 120 bp, Artificial Sequence
  Description of Artificial Sequence: Synthetic polynucleotide
cgtcgtccgcctcgatacccacgctgtccaagatcttcttgatgtccttggcgctgggggaggagttgccccctagggcagccagcaggtaggaggcgacgtagcgcatcgcggcggcgt

SEQ ID NO: 1196 - DNA, 120 bp, Artificial Sequence
  Description of Artificial Sequence: Synthetic polynucleotide
cagcaggtacactggcaagcttgccaataccctgggcaatgacgtcttcaatgttttttccattcagctcactgataaccttgttgagccggtcgtcgtccgcctcgatacccacgctgt

SEQ ID NO: 1197 - DNA, 120 bp, Artificial Sequence
  Description of Artificial Sequence: Synthetic polynucleotide
ttcttctcatctttcttctcctctgctgcagcaggggcagaaccagcagcaggggctgcagagcctggggcagcagagacggctacagccccaccagcaggtacactggcaagcttgcca

SEQ ID NO: 1198 - DNA, 120 bp, Artificial Sequence
  Description of Artificial Sequence: Synthetic polynucleotide
ttgagatgtgtaaaaaggctttatttgcaggggagcaggaatttaatcaaaaaggccaaatcccatgtcatcatctgactcttcagactcctccttcttctcatctttcttctcctctgc

SEQ ID NO: 1199 - DNA, 120 bp, Artificial Sequence
  Description of Artificial Sequence: Synthetic polynucleotide
atccggttcttcttaggcatcaacatctctgcggctgcagggtccggtaccggggctggaaaggaaggagcatgcgcggtgctgcgtctcttccgggctggcgtggacccgccccccgcc

SEQ ID NO: 1200 - DNA, 120 bp, Artificial Sequence
  Description of Artificial Sequence: Synthetic polynucleotide
tgaaggttgggcacattcttgtctgccagctccgggtgcttaggcatgtggacatccttcttggccaccatgactccctccttaaaaaggagttcataaatggcaatccggttcttctta

SEQ ID NO: 1201 - DNA, 120 bp, Artificial Sequence
  Description of Artificial Sequence: Synthetic polynucleotide
gatactggataccctcattggtaaggtaccagtagaaatgtctccaggcaaactgttccttcacgtagcctcgggacttgagagactgcatggccttcatgacatgaaggttgggcacat

SEQ ID NO: 1202 - DNA, 120 bp, Artificial Sequence
  Description of Artificial Sequence: Synthetic polynucleotide
gtcgctcaccctccagacctttaggccgaggcctgccagtctctggacggctacggcgtagggtggcaggcacaatctccgggggcagatgaaggtaatcacggagatactggataccct

SEQ ID NO: 1203 - DNA, 120 bp, Artificial Sequence
  Description of Artificial Sequence: Synthetic polynucleotide
ggttgctgacccagccccagcctcggctttcttgtcggcaccaggtggcacagcactccgtctgtaggtatctctgtcagcttcccctcttgtgagtctcgcaggtcgctcaccctccag

SEQ ID NO: 1204 - DNA, 120 bp, Artificial Sequence
  Description of Artificial Sequence: Synthetic polynucleotide
taaggttttttggctgtaagtttattcaatgcaaaagaatcctctccaattttactgaggtggctgaccacgtccacgaccaaatccgcctctaaactggaattcggttgctgacccagc

SEQ ID NO: 1205 - DNA, 120 bp, Artificial Sequence
  Description of Artificial Sequence: Synthetic polynucleotide
aggcacgctcagtctgaatgtccgccatcttcccggccgcctgaaaaaaagaaaggggcagcagcgtccgggtttccttatcgattacgcaggggctggagaggaagtgacgtaaggaga

SEQ ID NO: 1206 - DNA, 120 bp, Artificial Sequence
  Description of Artificial Sequence: Synthetic polynucleotide
tgaagcccagaccgatgttcttgtagtaccgcgggagcttctccttgccagtttctcccagcaggaccctcttcttgttttgaaagatggtcggctgcttttggtaggcacgctcagtct

SEQ ID NO: 1207 - DNA, 120 bp, Artificial Sequence
  Description of Artificial Sequence: Synthetic polynucleotide
tcttggtcaccacgccagagaggatccgccctcgaatggacacattaccagtgaaggggcatttcttgtcaatgtaggtgccctcaatagcctccttgggtgtcttgaagcccagaccga

SEQ ID NO: 1208 - DNA, 120 bp, Artificial Sequence
  Description of Artificial Sequence: Synthetic polynucleotide
ggggacaggtgtacagacatgttcttgtggcgcttctcgaagcggttgtacttgcggatgtagtgcagatagtctcggcggatgacaatggtcctctgcatcttcatcttggtcaccacg

SEQ ID NO: 1209 - DNA, 120 bp, Artificial Sequence
  Description of Artificial Sequence: Synthetic polynucleotide
ccggcagccttggtgaccttgagcacgttgaagcgcactgtcttgctcagaggccggcactcgcccactgtgacgatgtcaccgatctggacgtccctgaagcagggggacaggtgtaca

SEQ ID NO: 1210 - DNA, 120 bp, Artificial Sequence
  Description of Artificial Sequence: Synthetic polynucleotide
cgcggaagatcccaagtctggcctgggaatgagaaaataactttatttcattgtggggagcgggccgatgtccagcctcagaacttctggaactgcttcttggtgccggcagccttggtg

SEQ ID NO: 1211 - DNA, 120 bp, Artificial Sequence
  Description of Artificial Sequence: Synthetic polynucleotide
tccattacacctccagcagcaatgccttcctcggccatggcggtgggttacgggtgaagttgaatcttgaacgcacccaagcctccgcctccgcgcgactcggcggcggcagggaaagag

SEQ ID NO: 1212 - DNA, 120 bp, Artificial Sequence
  Description of Artificial Sequence: Synthetic polynucleotide
cgcttgtctaaggctttggcagcttcgcgaattccacgtgctaggccatcgtggatgagggcagtcttcagaacctcttgtaaagcagtattaacgtccattacacctccagcagcaatg

SEQ ID NO: 1213 - DNA, 120 bp, Artificial Sequence
  Description of Artificial Sequence: Synthetic polynucleotide
aattaggttgatttggtgttcagcacaaagggcctccaccaacttgacatacataggctcatcacagttggatgcaagcacacaaagatgggcttggcgcttgtctaaggctttggcagc

SEQ ID NO: 1214 - DNA, 120 bp, Artificial Sequence
  Description of Artificial Sequence: Synthetic polynucleotide
tacacaactgcaaccaaccactttacggggtttcccctctctgtcaattttacaaaggcctacccattctcctagtttcttgttgtcatcaaccttaattaggttgatttggtgttcagc

SEQ ID NO: 1215 - DNA, 120 bp, Artificial Sequence
  Description of Artificial Sequence: Synthetic polynucleotide
tttgtgagccaaagatttatttcttcatttcttgcatttgaaatactcttcaatgacatccttggcctgagactccttgccatagtccttaactactacacaactgcaaccaaccacttt

SEQ ID NO: 1216 - DNA, 120 bp, Artificial Sequence
  Description of Artificial Sequence: Synthetic polynucleotide
atgtcaacttcaaccaagtggggacgctgcgtcgatagggtaaagccgactgggacaggcccttcccgggagcatgcatgcgacccatgatggcggcgatcaggcaacgaaaggagagcg

SEQ ID NO: 1217 - DNA, 120 bp, Artificial Sequence
  Description of Artificial Sequence: Synthetic polynucleotide
gtacttgtgcaacaccatgtgaatctctcaggattacaccgatctgtgaaggagtaaggcccttcttggccagtttgtaaatctgctccttcacgtcgtcagatgtcaacttcaaccaag

SEQ ID NO: 1218 - DNA, 120 bp, Artificial Sequence
  Description of Artificial Sequence: Synthetic polynucleotide
acagcaactgctttcttaattaaatggtagagatcttcaggaagatcaggagcaagtcccttagacttaagaattcttaaaattttattgcctgtcacaaaacgtacttgtgcaacacca

SEQ ID NO: 1219 - DNA, 120 bp, Artificial Sequence
  Description of Artificial Sequence: Synthetic polynucleotide
ttggtcttataatatcgagccaaacggtgaatccggctctctattagaatcagacggaatttagcatccttatcctttctgttcctctcaagatgctttcgaacagcaactgctttctta

SEQ ID NO: 1220 - DNA, 120 bp, Artificial Sequence
  Description of Artificial Sequence: Synthetic polynucleotide
tagttaaacaatcattttattgcttgagtacacagacaaatttatgcgaccagggcagaggctgtagatgattcatatttccaattgggagggaggactcgcttggtcttataatatcga

SEQ ID NO: 1221 - DNA, 120 bp, Artificial Sequence
  Description of Artificial Sequence: Synthetic polynucleotide
ccacctgaggtccgaggctgatgacctgttcttccttcttttccttcccctttcgaggtgccatttctgcacgtcgtctccagactccacaccggaaagagagagtgggagggggcggag

SEQ ID NO: 1222 - DNA, 120 bp, Artificial Sequence
  Description of Artificial Sequence: Synthetic polynucleotide
ccaccagtcacacggcagatggtttccttgccagaaagatcagtgacatggacaaaagtgtcattgaaggatgcaaagatatggcagacaccaaatacattctctccttcagccacctga

SEQ ID NO: 1223 - DNA, 120 bp, Artificial Sequence
  Description of Artificial Sequence: Synthetic polynucleotide
tttgatgtgtagggcggtgatacccagctccttgcacctctgggccacatcctgggcagccaacatagcagcatatggtgaggattcatctcggtctgcctttaccttcatcccaccagt

SEQ ID NO: 1224 - DNA, 120 bp, Artificial Sequence
  Description of Artificial Sequence: Synthetic polynucleotide
gggtgacatcctcaatccgcccgatcttcatacccgagcgggcaagggctctgagggccgactgggccccaggtccaggggtcttggtcctatttcctcctgtggcccggagtttgatgt

SEQ ID NO: 1225 - DNA, 120 bp, Artificial Sequence
  Description of Artificial Sequence: Synthetic polynucleotide
tgaaacagtttacatgaaggcaatttattaacagaaaatattttgaggaatcttgttcacagacggcgaccacggcgaccccccttcctgcgagtgctgtcagaggggatgggggtgaca

SEQ ID NO: 1226 - DNA, 120 bp, Artificial Sequence
  Description of Artificial Sequence: Synthetic polynucleotide
tgccaggacattcatgcgcaccattgtggcttagattgcaggatggcgccgatggcagacggatgaaattggagctctcagagagtgctactcaccggcgcggaaagatggcggaaagag

SEQ ID NO: 1227 - DNA, 120 bp, Artificial Sequence
  Description of Artificial Sequence: Synthetic polynucleotide
gcttcatcatcacagtgagaaaccggacgatgactttggagcacggcctaataagcacctggcgtttgcctctcttttcggcattgttgatactcttgagagcatctgccaggacattca

SEQ ID NO: 1228 - DNA, 120 bp, Artificial Sequence
  Description of Artificial Sequence: Synthetic polynucleotide
aatctggggctgatcaccccacacttgtttagcctgcctgtgaggttcacaacaattttcccagctctgtggtcatcaatgatttcaaattcgccaatgtaaccatgcttcatcatcaca

SEQ ID NO: 1229 - DNA, 120 bp, Artificial Sequence
  Description of Artificial Sequence: Synthetic polynucleotide
ttcatggtccatgatgccagctgaggttgtcagtacaatgaaaccaaactggcgggatggaagcagattattctgccatttttccaggtctttgagttgcacgtcaaatctggggctgat

SEQ ID NO: 1230 - DNA, 120 bp, Artificial Sequence
  Description of Artificial Sequence: Synthetic polynucleotide
ttggaagcaccagagtccatgaggcattttatttgtaaatatatgtattacatccctagaaaaagaatcccaggattttccctcctgtgtgttttcgtcttgcttcttcatggtccatga

SEQ ID NO: 1231 - DNA, 120 bp, Artificial Sequence
  Description of Artificial Sequence: Synthetic polynucleotide
cgccgcggtaggtgaacttgcggaaggtccgcttcttcttctgctctacttctgccatcttgccggatcctcagaagagatcgctttggtccgcgcctgcgcagttatcgcgagactgcc

SEQ ID NO: 1232 - DNA, 120 bp, Artificial Sequence
  Description of Artificial Sequence: Synthetic polynucleotide
tgctgcttccgccgcaggccccggttcagccgccgccgctggcgcgcactgtacagctgcatcagctgctcgtaggacatgtccagcagctggtcgaggtccacgccgcggtaggtgaac

SEQ ID NO: 1233 - DNA, 120 bp, Artificial Sequence
  Description of Artificial Sequence: Synthetic polynucleotide
tcgggtaggatgatcatgtcccgcaggtgcgtcttcaccacttccggcttctccatgggcggcgcctccttcttggccttgcgcaggcgcttcagcagggagtgctgcttccgccgcagg

SEQ ID NO: 1234 - DNA, 120 bp, Artificial Sequence
  Description of Artificial Sequence: Synthetic polynucleotide
ggtgatggagaactcgcccaggtagtggccgatcatctcgggcttgatctccacctggttgaaggtcttgccgttgtagacgcccaccatgctgcccaccatctcgggtaggatgatcat

SEQ ID NO: 1235 - DNA, 120 bp, Artificial Sequence
  Description of Artificial Sequence: Synthetic polynucleotide
ggagtcatgtgcgcctttattagctgagccattacttgagagggatgaagcgggaggagtgggtggccccgatgccgggccggccatgctttacgggcttgtaggtgatggagaactcgc

SEQ ID NO: 1236 - DNA, 120 bp, Artificial Sequence
  Description of Artificial Sequence: Synthetic polynucleotide
agacctgcacagactgcagcgggcccttggacggcatggctccgagcgtggactagacaacctcaccgcgcggcgccgcaaccggaaaaggaaagctaggggccaccctggccgcttttc

SEQ ID NO: 1237 - DNA, 120 bp, Artificial Sequence
  Description of Artificial Sequence: Synthetic polynucleotide
gcagcttgtactgtagcgtgcgcggctcaatcatctccaggggccgcccgttcaccttgatgagaccattgccgcgtttgcagtgcgccacagctgtcgctgtcttcttgcgtccgaaga

SEQ ID NO: 1238 - DNA, 120 bp, Artificial Sequence
  Description of Artificial Sequence: Synthetic polynucleotide
gctttggagatggactgacggatagcataaatctgggccacgtgaccaccaccctttacacggacacggatgtctacaccagcaaatcgctccttgccgagaagcagaactggctccagc

SEQ ID NO: 1239 - DNA, 120 bp, Artificial Sequence
  Description of Artificial Sequence: Synthetic polynucleotide
tttggactcgcagcgacgagggtcagctaccagcagggtccggtcatactggatgaggatgtctttgatctccttcttggaagcctcatccacatatttctggtaataggccaccagggc

SEQ ID NO: 1240 - DNA, 120 bp, Artificial Sequence
  Description of Artificial Sequence: Synthetic polynucleotide
ttcttgaaactttaaaatccctcaaaaactgtttattatacaagtgagttttgagtcacgatgggcttatcggtaggatttctggtagcgagcgcgggcaccagggcctccaaacttttt

SEQ ID NO: 1241 - DNA, 120 bp, Artificial Sequence
  Description of Artificial Sequence: Synthetic polynucleotide
tcgtgtggaagtcgttgcccaggcgcgtgtagtacttttctatgatgacccgggccgccttcttcacggttttggtgcgaacgcggcccatgttggcgggtccttggtaaaagaggaaac

SEQ ID NO: 1242 - DNA, 120 bp, Artificial Sequence
  Description of Artificial Sequence: Synthetic polynucleotide
gaattcgcttcatcagatgcgtgacataacctgctatcttgttgcggagctttttgctggggataatggcgatctcctcgcacacgcgcttgttcgtgtggaagtcgttgcccaggcgcg

SEQ ID NO: 1243 - DNA, 120 bp, Artificial Sequence
  Description of Artificial Sequence: Synthetic polynucleotide
atccaaggctgagacctcaggaacataattgtctctcctttctctctcctcctcctgcagcttgatggagatacctcttactgggcctctctgaattcgcttcatcagatgcgtgacata

SEQ ID NO: 1244 - DNA, 120 bp, Artificial Sequence
  Description of Artificial Sequence: Synthetic polynucleotide
gtaggctgagtgacctgaaggttggacagactgccgaagtccaaaagcttcagcatttccttagtgtcaggatctacttcaataatctcctgatccaaggctgagacctcaggaacataa

SEQ ID NO: 1245 - DNA, 120 bp, Artificial Sequence
  Description of Artificial Sequence: Synthetic polynucleotide
tttttgctgttgtcccagatttattgaaaataatacagcactacagaaaaaattcaaacaggtccccgaggcgttttgaaattcatcccaactgtaggctgagtgacctgaaggttggac

SEQ ID NO: 1246 - DNA, 120 bp, Artificial Sequence
  Description of Artificial Sequence: Synthetic polynucleotide
tttccgccgcccatcgatgttggtgttgagtactcgcaaaatatgctggaacttttcagggatcactagagacatggctgcagcacaagcggcggcgtgtaggcctcctgtggaagagag

SEQ ID NO: 1247 - DNA, 120 bp, Artificial Sequence
  Description of Artificial Sequence: Synthetic polynucleotide
cagtgagttctcccgccctcttggtgaggtcaatgtctgctttcctcaacaccacatgagcatatcttcggcccacacccttaatggcagtgatggcaaaggctattttccgccgcccat

SEQ ID NO: 1248 - DNA, 120 bp, Artificial Sequence
  Description of Artificial Sequence: Synthetic polynucleotide
ctgtattttccatcctttacatccttctgtctgttcaagaaccagtctgggatcttgtactggcgtggattctgcataatggtgatcacacgttccacctcatcctcagtgagttctccc

SEQ ID NO: 1249 - DNA, 120 bp, Artificial Sequence
  Description of Artificial Sequence: Synthetic polynucleotide
gacacgaaggccccagaagtgacgcagccctctatgggcccgaatcttcttcagtcgctccaggtcttcacggagcttgttgtccagaccattggctaggacctggctgtattttccatc

SEQ ID NO: 1250 - DNA, 120 bp, Artificial Sequence
  Description of Artificial Sequence: Synthetic polynucleotide
ttgtatataaactatttattaacagacaaggcctacagacttatttcttcttggacacacccacggtgcggccacggcggccagtggtcttggtgtgctggcctcggacacgaaggcccc

SEQ ID NO: 1251 - DNA, 120 bp, Artificial Sequence
  Description of Artificial Sequence: Synthetic polynucleotide
ccggagtgtaatagagagaggatagagagctcctgttcggagctgggggaacttggcttcgtttgcgtcgttcgtggctggaaggaacagtggtggagaatactatgatggcgaaagtac

SEQ ID NO: 1252 - DNA, 120 bp, Artificial Sequence
  Description of Artificial Sequence: Synthetic polynucleotide
gtccccgcctagaggggagggtgtctagtgaggggtggagaggtaaaggggagggccaaggggtcgcgcgtggaggcctgggtttcctcccgcgtttccttctcccggagtgtaatagag

SEQ ID NO: 1253 - DNA, 120 bp, Artificial Sequence
  Description of Artificial Sequence: Synthetic polynucleotide
ggtttcccgggcgcacaagtcgggcgtagggtctcgcgagagttccgaaagctcgcgagagcgagggtagacgctgaggctccgcctctctcagggcgaaagttcgtccccgcctagagg

SEQ ID NO: 1254 - DNA, 120 bp, Artificial Sequence
  Description of Artificial Sequence: Synthetic polynucleotide
aggctgccagagctctgacgaactcctgctggttcacgtcttttacagtaactccaggcatcgtgcggcctccgcgctgccagccaggggaaagggaacgacggggtttcccgggcgcac

SEQ ID NO: 1255 - DNA, 120 bp, Artificial Sequence
  Description of Artificial Sequence: Synthetic polynucleotide
cgtgtagaaccagttctcatcgtagggagcaagctctttgtgcttggccagcttgacggtatccacccattcggggactttcagcttcccggactttttgaggaaggctgccagagctct

SEQ ID NO: 1256 - DNA, 120 bp, Artificial Sequence
  Description of Artificial Sequence: Synthetic polynucleotide
ctgggcatgacgccgtttctctgacgtcccccatagatcttggtcatggagccaaccccagcgccaccccggaggtacaggtgccgcgctgtggaagcagctcgcgtgtagaaccagttc

SEQ ID NO: 1257 - DNA, 120 bp, Artificial Sequence
  Description of Artificial Sequence: Synthetic polynucleotide
ggtgtcagtttgcggccgccatcttggtccttttccaccattttcagcccctccagggcttggaggacccggcgggccacactcttggagcctcggctgaagtggctgggcatgacgccg

SEQ ID NO: 1258 - DNA, 120 bp, Artificial Sequence
  Description of Artificial Sequence: Synthetic polynucleotide
tttacgaatgaggcaatttattaacccagcatggtttgttctaatgcttcttgttggcagctgccacctgtccggcgattctgtccagatctctttgtccctgaggtgtcagtttgcggc

SEQ ID NO: 1259 - DNA, 120 bp, Artificial Sequence
  Description of Artificial Sequence: Synthetic polynucleotide
ggaccaaaaatcctcagcccttacgaccgcgtcttcctcaaaaagaaaggggtgggacttgagcaacgcttatatagcacgcttgcatccgggtcccacacgccccggaacaggaaatat

SEQ ID NO: 1260 - DNA, 120 bp, Artificial Sequence
  Description of Artificial Sequence: Synthetic polynucleotide
ctccggctccacgggtgtttttccggtatccttaaaagccatggctgttgcgcgcgggcttcctgaccgacttgttcctcggcgagagcgaacagcggtgagtcaggagcaggagcgtgc

SEQ ID NO: 1261 - DNA, 120 bp, Artificial Sequence
  Description of Artificial Sequence: Synthetic polynucleotide
aactggtcctttcactttgagattcttttcttttgcgcctcttatcaagtcagcacacaccttttccaaggattttacgttgcggcttgttagggtgattcgaattcggtgaattgccac

SEQ ID NO: 1262 - DNA, 120 bp, Artificial Sequence
  Description of Artificial Sequence: Synthetic polynucleotide
aggactgtgcaagtcaatgagtcgcttgtgaattctcatctggaaacgatcccacgtcttagaaccttcaccacaaggagtttttcttgtagtgattctcaaagtcttggtaggcattcg

SEQ ID NO: 1263 - DNA, 120 bp, Artificial Sequence
  Description of Artificial Sequence: Synthetic polynucleotide
cagaagttaacaactggtcatcaatttattaaaatagttgacttaagcatctgcaatggtgacttccacctcaactcctggctcaatactgatggaagtaatctgcttaacaatctcaga

SEQ ID NO: 1264 - DNA, 120 bp, Artificial Sequence
  Description of Artificial Sequence: Synthetic polynucleotide
aacgacaacgaaaacaggatagaccactctaagatacccatatattccacctgaaaagtggaagtctcatagtacacctttatattcctaaaatctgccagtattctgaataaaaaccaa

SEQ ID NO: 1265 - DNA, 120 bp, Artificial Sequence
  Description of Artificial Sequence: Synthetic polynucleotide
tccccataccaatcagaatttatctagagtatgccaaagttataaactgccagtgtccaataaaaccagtcaggtctcacatattatgtagttaacggaatccagttttcaaatgactca

SEQ ID NO: 1266 - DNA, 120 bp, Artificial Sequence
  Description of Artificial Sequence: Synthetic polynucleotide
gtccacgaactcgccggcgtcgttctgcatttcgaggctgggctgcgcctgctgccaccacaccgcgcgcgagagagaaaggaagcagctagtcacccggcagagatatcggcgggcaag

SEQ ID NO: 1267 - DNA, 120 bp, Artificial Sequence
  Description of Artificial Sequence: Synthetic polynucleotide
cttgtcaacctcggccacgttcatctggatggatgcgtggtccttggcaccgatgatgcgattgctagcggagcatttccgcggcacgtacaggtccacgaactcgccggcgtcgttctg

SEQ ID NO: 1268 - DNA, 120 bp, Artificial Sequence
  Description of Artificial Sequence: Synthetic polynucleotide
ccaatcggagaatggaatcatctgactcacccatcctacgaatggccccgcagatagcataagttttaaactggccattaaacctgcctgtgaccttgtcaacctcggccacgttcatct

SEQ ID NO: 1269 - DNA, 120 bp, Artificial Sequence
  Description of Artificial Sequence: Synthetic polynucleotide
tttttaggttttcattatttatttatgacaaatattccacatctgtgattctctccagtcaaaagttctttgagacgatgccatcggccttggccaatcggagaatggaatcatctgact

SEQ ID NO: 1270 - DNA, 120 bp, Artificial Sequence
  Description of Artificial Sequence: Synthetic polynucleotide
agtacgaagtccacgacacttgcccatcctgtcggcgccacgggcctgagcgaaagagagaagcaccgcaggaaggagccacaagccaccgcgagcaagccccgcccagccaaggacccc

SEQ ID NO: 1271 - DNA, 120 bp, Artificial Sequence
  Description of Artificial Sequence: Synthetic polynucleotide
cttttgcatgagaagcacctccaaaagggttggcctttagggctgtgcccaaatgagctttcttatactgtttatcatgccacttctggtctcgtcggtgactacggagcttcctagcag

SEQ ID NO: 1272 - DNA, 120 bp, Artificial Sequence
  Description of Artificial Sequence: Synthetic polynucleotide
gtcattgggtacaaaggctgtgattttcttgccattcttgatcagctggacccttacacacttcctaatggcagaatttggctgtttggcttcaactcctactttttccagcacgattcc

SEQ ID NO: 1273 - DNA, 120 bp, Artificial Sequence
  Description of Artificial Sequence: Synthetic polynucleotide
cattggctactttgacaaccttaaagcggactccaggaatatcaccaacagcatgacctttgcgaccaaatccagcaaccagaacttcatcattttcctcaataaagttcaagcaaccgt

SEQ ID NO: 1274 - DNA, 120 bp, Artificial Sequence
  Description of Artificial Sequence: Synthetic polynucleotide
ggacagtaagatacaaacattttttggcatatgaaaatttattactacagtgttttcaccattaatatttatgatcttggtctttccttcttgcctttgtatagggccaaaagagaaaca

SEQ ID NO: 1275 - DNA, 120 bp, Artificial Sequence
  Description of Artificial Sequence: Synthetic polynucleotide
acaaccctgtcttattgtctcctaaaattggtacaggtcctgcgtttgctggtttaggataaaaaaaataagggggggtggtggtggtaatgaacatgatcttcgtggtgagaacagggg

SEQ ID NO: 1276 - DNA, 120 bp, Artificial Sequence
  Description of Artificial Sequence: Synthetic polynucleotide
ttcttaaagtaatactacaatactgcacatttattccagatctatcccattttcttattccacaggatgagggaaactgtgccaggttacaaatgttattaactctagagaatcctgaaa

SEQ ID NO: 1277 - DNA, 120 bp, Artificial Sequence
  Description of Artificial Sequence: Synthetic polynucleotide
taatctatgtgcaatgaaatttggtaactgaagtgttgcacccgatatggaaaataccaagaataaaaaagaaagtatctcactagaatttcagtgagtttttgaagttcccttaaagtt

SEQ ID NO: 1278 - DNA, 120 bp, Artificial Sequence
  Description of Artificial Sequence: Synthetic polynucleotide
cagatcctgacacctttaaataataaacagagtggggagcaattttgagtttactatttatcatcttgggcccctgtaagatggatacaagaatgtgcatttccaagggtacctaagata

SEQ ID NO: 1279 - DNA, 120 bp, Artificial Sequence
  Description of Artificial Sequence: Synthetic polynucleotide
actgaaaacatcagtcttgtcgtataccttatctcccttgcctggcatatacttccatcaactaaatgatccaatgcctgtattctcctaaacacattaatgtagacacattacaacaca

SEQ ID NO: 1280 - DNA, 120 bp, Artificial Sequence
  Description of Artificial Sequence: Synthetic polynucleotide
gtactcaatacctagcttaaattatcaaaacacaaccaatcttgtctctacactaaaccacttcatttgctgactagtctttgaagacatgaaggtctctgacaacctcatgagaagata

SEQ ID NO: 1281 - DNA, 120 bp, Artificial Sequence
  Description of Artificial Sequence: Synthetic polynucleotide
tgttaacaggagtttcttacatcagatttaaagcagaaggctcacagcttcatttcaaccatgccactgtatccatgaaaactctgaaacaagtatttgtggacagcaaaatccacatgt

SEQ ID NO: 1282 - DNA, 120 bp, Artificial Sequence
  Description of Artificial Sequence: Synthetic polynucleotide
aaaggttctgctcttgatcctacggaaagtgggcaaccaaaccaattgttttccaaagatcctaaacaatgtaaagctaggctttgatcaaagggctaattaacccatacttactatttg

SEQ ID NO: 1283 - DNA, 120 bp, Artificial Sequence
  Description of Artificial Sequence: Synthetic polynucleotide
tgaggatgaccaactgagaccagtgttgctggagcacaaagtgccaaggagagaaatggcaggctaaggctggaatatgcaggtatgaagcgcaacctgggttcttctgtgccatgtgaa

SEQ ID NO: 1284 - DNA, 120 bp, Artificial Sequence
  Description of Artificial Sequence: Synthetic polynucleotide
tcaagagataaaccgaagtgtgctggaaaacacacgagctctttagtaagagcaggcgacatgcaaggaaccatagtaacaggaacagaggtcctgaggctggatatggaacccaagttt

SEQ ID NO: 1285 - DNA, 120 bp, Artificial Sequence
  Description of Artificial Sequence: Synthetic polynucleotide
tgttgagcccctgggaacagcttagccaaatactgactgcagctacacgttaggaaacactggtacaaaccaacaggcagcctttccgcccttgcggagggagagactagcatcatcatc

SEQ ID NO: 1286 - DNA, 120 bp, Artificial Sequence
  Description of Artificial Sequence: Synthetic polynucleotide
gcctggaatcgcgctgcaaccgcggcctctttccctggttctggccaggtgagcgaggcctagcaatctctcccgcatcacaaaggattgggtcagttaaggctcatccgaaagcatctg

SEQ ID NO: 1287 - DNA, 120 bp, Artificial Sequence
  Description of Artificial Sequence: Synthetic polynucleotide
ccaggccacatccctgggcgcccgcgctgtcccactcccttcctggtgcgccccgcctcgcggtcacaagggccccaccgcccggggagagctgcccaccccgcgcctgacgcccagggc

SEQ ID NO: 1288 - DNA, 120 bp, Artificial Sequence
  Description of Artificial Sequence: Synthetic polynucleotide
agcccctgggcctcaggtaggactgcttagcagtgaaaagggcgtcctgggtgcagccaacagggtacagctgcaagccattgttgaaggtgtcttgacgtatcagagaaggcaggtaac

SEQ ID NO: 1289 - DNA, 120 bp, Artificial Sequence
  Description of Artificial Sequence: Synthetic polynucleotide
acacaaggcagtggggaaaggggctggggggccacacagagaaaggagaaggcactaagatcaggctcagcagcttctggatctgaggcgccggagattatttatgggtcaatctggcag

SEQ ID NO: 1290 - DNA, 120 bp, Artificial Sequence
  Description of Artificial Sequence: Synthetic polynucleotide
gttttaagataaatccgttggccatacttctgaatgtctatttatggattccctatcttattttattgatgtgtatttttgtctctcctccatggatacatgaaggaaagggccttggac

SEQ ID NO: 1291 - DNA, 120 bp, Artificial Sequence
  Description of Artificial Sequence: Synthetic polynucleotide
tagatatatgatccattttgagttaagtttgtattacatgtaaggttggggttcctttgttttggtctttgacaaatggaagtccacaacatttattgaaactcttcttcctccattggt

SEQ ID NO: 1292 - DNA, 120 bp, Artificial Sequence
  Description of Artificial Sequence: Synthetic polynucleotide
ccaatttatctattttttcttttacggcatgtgcttttggtgtaatgtctaaaaactatacctacgcctaggttgtaaagatagtctgttttcagttttatagctttccattttacattt

SEQ ID NO: 1293 - DNA, 120 bp, Artificial Sequence
  Description of Artificial Sequence: Synthetic polynucleotide
ctattaatttcttcccaactcagcctcccaaagtgctgggattacaggcatgaaccacagcgcccagcttaacaggatttttcagagagaaaaagttttttaattttaatgaaatccacc

SEQ ID NO: 1294 - DNA, 120 bp, Artificial Sequence
  Description of Artificial Sequence: Synthetic polynucleotide
ttttcttaaaacaggtactgagtataaaacaatataaaacaatatgagaaggtctctctcttccctcaagagtgtatgactttgctgcccaggatgatcttgaactcctggcctcaagct

SEQ ID NO: 1295 - DNA, 120 bp, Artificial Sequence
  Description of Artificial Sequence: Synthetic polynucleotide
taacatcaggttctaagtcgtaagttgatttttaactactaggtttaggccaggcaggcccagggctggtttcaggcctggtgccgggctgcctgtctttgatttcacttccttgttttt

SEQ ID NO: 1296 - DNA, 120 bp, Artificial Sequence
  Description of Artificial Sequence: Synthetic polynucleotide
atgaaagggtcgtgattgattgagcaatctaggggatatgtgacaggggtttcatgcactggtacagaacacaacagggagtttcacaatttttttatacaatgcttggaatctacggat

SEQ ID NO: 1297 - DNA, 120 bp, Artificial Sequence
  Description of Artificial Sequence: Synthetic polynucleotide
tgtagaaggaagggctttattcagctgggagcatcggcaagctacagccttaaaatctgagctcctcaagtgcacaatttctgtcccttttaagggctcacaacactaaagatttcacat

SEQ ID NO: 1298 - DNA, 120 bp, Artificial Sequence
  Description of Artificial Sequence: Synthetic polynucleotide
gccaaggaggaaaagagaaccacgattcgccggccaatcatatcaacgcgcacggaaggaccccgggaagagccggcgtgggggcgtgggcgcgccacgaggctgaccgcgccgatgcct

SEQ ID NO: 1299 - DNA, 120 bp, Artificial Sequence
  Description of Artificial Sequence: Synthetic polynucleotide
gacatcaatgaccatttgtttcctctgaagtagtcggttggtcatgaactttctagtgcggatagttacggtgtcgttcatgatggcgatctatcttcagacagccaaggaggaaaagag

SEQ ID NO: 1300 - DNA, 120 bp, Artificial Sequence
  Description of Artificial Sequence: Synthetic polynucleotide
ttctgaatccaaatacaaagatgacatccggtgtggtcttgtacattttggctagtttttcccgaatttctgtcttaggcactgtcgccttcccggggtgaaggacatcaatgaccattt

SEQ ID NO: 1301 - DNA, 120 bp, Artificial Sequence
  Description of Artificial Sequence: Synthetic polynucleotide
ggccatgtcttgcaagtctatgtttgggttcatttttctttgcataatccagggaatcataaatcatgccaaagccagttgtcttgccaccaccaaaatgagttctgaatccaaatacaa

SEQ ID NO: 1302 - DNA, 120 bp, Artificial Sequence
  Description of Artificial Sequence: Synthetic polynucleotide
tttttgccagcaccaacattggcctttgcagtccccctgactttcttcattctgttcttgcgttcctttcgttgctttcttgaggtctttttcttctcatacaggccatgtcttgcaagt

SEQ ID NO: 1303 - DNA, 120 bp, Artificial Sequence
  Description of Artificial Sequence: Synthetic polynucleotide
tttcaaacaaccagacacatgaagtttttagtttattaatgttcttgcgaaaaatccacagtggccacagctaacatcattgcagcacctttactccttcggctttttgccagcaccaac

SEQ ID NO: 1304 - DNA, 120 bp, Artificial Sequence
  Description of Artificial Sequence: Synthetic polynucleotide
gtctttcttggccgactttccagcgtccttcttcttcttgtcgtccttaggcggcattgcgaagctcggagaatagcagcagacaccgcagcctcgtcaagatgtcggacaaaaaggaag

SEQ ID NO: 1305 - DNA, 120 bp, Artificial Sequence
  Description of Artificial Sequence: Synthetic polynucleotide
aaacaagactaagttattgagcttgtcccgaactttgcctttggaccacttcttctttttggccttgcccccggatttgttcactgggtctttgtctttcttggccgactttccagcgtc

SEQ ID NO: 1306 - DNA, 120 bp, Artificial Sequence
  Description of Artificial Sequence: Synthetic polynucleotide
cctcgaatcttcagtctctcagagaccacagctggggttataagtttatagttgggaacttccttacagagtttatcataggtagctttgtcaaacaagactaagttattgagcttgtcc

SEQ ID NO: 1307 - DNA, 120 bp, Artificial Sequence
  Description of Artificial Sequence: Synthetic polynucleotide
ttctggtgtaaattacttgagctctgtgctttgaaaccagtttgataagtcctttactaaggagctcctgaagggctgccctggccagggagcctcgaatcttcagtctctcagagacca

SEQ ID NO: 1308 - DNA, 120 bp, Artificial Sequence
  Description of Artificial Sequence: Synthetic polynucleotide
tgatttaataaagttttatttttccaaatgtacagctggttggacctattcatgcatcttcaccagcagctggagcatctccacccttggtatttctggtgtaaattacttgagctctgt

SEQ ID NO: 1309 - DNA, 120 bp, Artificial Sequence
  Description of Artificial Sequence: Synthetic polynucleotide
cagcatttctgctgaaatctagggtggaaatgcgttcctagtgtttatttatccatggaacaaagtgcacatgggactatttagccggatggcggaagaaaatcgaggttatgtgtctcc

SEQ ID NO: 1310 - DNA, 120 bp, Artificial Sequence
  Description of Artificial Sequence: Synthetic polynucleotide
cctggcagggccctcctatatagcatgagatccctacgcggacaccgggagaatccttaggagacgggcttcaagaacggcaactcactttactcaaatattcctttacattcagcattt

SEQ ID NO: 1311 - DNA, 120 bp, Artificial Sequence
  Description of Artificial Sequence: Synthetic polynucleotide
cacagttagtgcagcgaataggctgcacgtggccgcggccctttttggcacgaccattgttccttcttttctttgtcatcttggaggcacggaccggagagaggagacggtgcctggcag

SEQ ID NO: 1312 - DNA, 120 bp, Artificial Sequence
  Description of Artificial Sequence: Synthetic polynucleotide
agcacataggcatcgaagacgctcgcttcagaaatgtccctgactgctgcggcctccactatgtttcgaatgacgaatttcttaatggccttgtccttgggcacgcatcgggcacagtta

SEQ ID NO: 1313 - DNA, 120 bp, Artificial Sequence
  Description of Artificial Sequence: Synthetic polynucleotide
aaatcggggtgggggtgttcggtccttgcgggcttcacgagatcgattcctgactactttgctgtgaattgcacaactcacacagtaatgtagcttcacatacagcttgggaagcacata

SEQ ID NO: 1314 - DNA, 120 bp, Artificial Sequence
  Description of Artificial Sequence: Synthetic polynucleotide
aagtacaatttccattttatttttctccagagaatagcctgtcttcagtctttaagaactcagctccttacatgggctttggtgggggacgtggggcagcacccgcaggtctaaatcggg

SEQ ID NO: 1315 - DNA, 120 bp, Artificial Sequence
  Description of Artificial Sequence: Synthetic polynucleotide
ttggggctctgcaccaggcgtttcttcttgtgtttcctcttctcctcttctggagagggatgaaggagatcctttgcgagaggcatgttctcgtgtgcgtaggtcgtcaccgccggaaag

SEQ ID NO: 1316 - DNA, 120 bp, Artificial Sequence
  Description of Artificial Sequence: Synthetic polynucleotide
ctgtaggctggcagaggacagtggagcagccaacacacaaaactaccgtttgtgcatggctaaagaccgtggtgattttatagcatcctgggcatttcacatccatgaagtaggaattgg

SEQ ID NO: 1317 - DNA, 120 bp, Artificial Sequence
  Description of Artificial Sequence: Synthetic polynucleotide
tcaggatttatccaaaatgtgtttattgagatggtttcccactcatcttgactcagagtgcttttagtgctgcttcctcctgaaggaacatccttctgtaagccttgcttttcctcctgt

SEQ ID NO: 1318 - DNA, 120 bp, Artificial Sequence
  Description of Artificial Sequence: Synthetic polynucleotide
acctgcgtgcactgtccctgagaaccggtcctgcccaggaccttggtgaccctggccagcttgataggctgcacacggctggtgtccatgatggcggcgcggcggcggtctggcggagag

SEQ ID NO: 1319 - DNA, 120 bp, Artificial Sequence
  Description of Artificial Sequence: Synthetic polynucleotide
aaaagggtgagcacgtcgccctcgcgcacggggccttttacattgcggatgatggatcggctcgtgtcgtccatgaattccacgcgcacctgcgtgcactgtccctgagaaccggtcctg

SEQ ID NO: 1320 - DNA, 120 bp, Artificial Sequence
  Description of Artificial Sequence: Synthetic polynucleotide
tcccatcggccaagtggtcgaacccgacatccaagacccagcgagcagccaagctcagcgcaacctccgggcttctcgctctgactccaaaagggtgagcacgtcgccctcgcgcacggg

SEQ ID NO: 1321 - DNA, 120 bp, Artificial Sequence
  Description of Artificial Sequence: Synthetic polynucleotide
ttaacttgaaacacaaacgctttatttaaaggagcatctcagttacgtgtggcggacaaaaaaaaggagcagactgtgacagaccattcccatcggccaagtggtcgaacccgacatcca

SEQ ID NO: 1322 - DNA, 120 bp, Artificial Sequence
  Description of Artificial Sequence: Synthetic polynucleotide
ccctggccgaattttcgcgggtggctccagtacagctgctggtgacccatcttgctctcagcagtgcaacgaggtaaaaggaagaagctggcccacgcatgcgctcttcaaatttttgag

SEQ ID NO: 1323 - DNA, 120 bp, Artificial Sequence
  Description of Artificial Sequence: Synthetic polynucleotide
taatgaaaccgatatccttcgcgtactgacggaaacactggcggcacatattgaggccatatttccggatcagaccgtgccggtttgaacagacacgacaagagcgagaaccctggccga

SEQ ID NO: 1324 - DNA, 120 bp, Artificial Sequence
  Description of Artificial Sequence: Synthetic polynucleotide
tttttgaagggttttttcaaatgtttattttatatacaaagaattatcatggtttttcattgagtagatgccccggataatcctctgaaggaagagcatttagtccaacttaatgaaacc

SEQ ID NO: 1325 - DNA, 120 bp, Artificial Sequence
  Description of Artificial Sequence: Synthetic polynucleotide
tgccactgccgaaacctccgcggaagccaccgcggttccccatcccagggccaccagggcccccgggcccccccgctgcaccggcgtcatccgccatttggtgttttgtcggaaaagaag

SEQ ID NO: 1326 - DNA, 120 bp, Artificial Sequence
  Description of Artificial Sequence: Synthetic polynucleotide
ccttgaccaagcggcccaacttggtgacgggcatccactccttatcctcggccttgcctccgcgagctccgcggcctcggccccggccccgtccacggccgcgaccccggccccggatgc

SEQ ID NO: 1327 - DNA, 120 bp, Artificial Sequence
  Description of Artificial Sequence: Synthetic polynucleotide
ggcataatcttcaaaacctcatccttgagagaggcccccaggaagaaatcaatgatctctgattccttaataggcagggagaagagatagatctcctccagggacttgatcttcatgtcc

SEQ ID NO: 1328 - DNA, 120 bp, Artificial Sequence
  Description of Artificial Sequence: Synthetic polynucleotide
gcggtggccacctccttggagcacttaacacccagaccgacgtggccattgtagtccccgatagcaacaaatgccttgaacctggtgcgctggccggcacgggtctgcttctgcactggc

SEQ ID NO: 1329 - DNA, 120 bp, Artificial Sequence
  Description of Artificial Sequence: Synthetic polynucleotide
gccgcagcggcctgtcaccttgcaagggacagtgtggggcttgccgatcttgttcccccagtagcctctgcgcacggggacgatggagagcttggccaggatgatggccccacggatggc

SEQ ID NO: 1330 - DNA, 120 bp, Artificial Sequence
  Description of Artificial Sequence: Synthetic polynucleotide
gccccgggctgaggtgtagcagtcatcgataccagccatcatgagcagcttcttaggcacaggtgcggagacgatgccagtgcccctgggtgcagggatgaggcgtaccagcacagagcc

SEQ ID NO: 1331 - DNA, 120 bp, Artificial Sequence
  Description of Artificial Sequence: Synthetic polynucleotide
cctgatagggagacttggtgaatacagtctccttccagaggtcgggggtcaggtagctgtaggtcttagaaatggcatcaaaggtggccttggcgaagttgcccagggtggcagtgcagc

SEQ ID NO: 1332 - DNA, 120 bp, Artificial Sequence
  Description of Artificial Sequence: Synthetic polynucleotide
cacgcttaattcactttatttttcttgtataaaaaccctatgttgtagccacagctggagcctgagtccgctgcacggagactctggtgtgggtcttgacgaggtggtcagtgaactcct

SEQ ID NO: 1333 - DNA, 120 bp, Artificial Sequence
  Description of Artificial Sequence: Synthetic polynucleotide
tgccgcctttcgtaaggcgcttgttcttgccaaccgccatggtgctggtcagagagccaaaagggcggaagtgggagtcgcgcgagaacttaggcgtacgggggcggggcgcgccgtcta

SEQ ID NO: 1334 - DNA, 120 bp, Artificial Sequence
  Description of Artificial Sequence: Synthetic polynucleotide
ggtcctggtgacgagcgtctttccaatatttcttatattgaacatagcaggtgctttcacatcataccaatctttcttagaaaatggatcaaccactttcttcttggctccctttttgcc

SEQ ID NO: 1335 - DNA, 120 bp, Artificial Sequence
  Description of Artificial Sequence: Synthetic polynucleotide
acatcttcagtaatcagcttgaattttctaaatgcaacttcatcattctgcaaatcagcaagactcacttcaaacacacgacccttgagaccatcagatgcaattttggttccttgggtc

SEQ ID NO: 1336 - DNA, 120 bp, Artificial Sequence
  Description of Artificial Sequence: Synthetic polynucleotide
tagtcttgacatcaacgtgagcttcaatcattgtctgccattttttgaccatggaacacattttgtcacgggtaagatccatgccatggaagttagtcaggcagtttttaccctgaacat

SEQ ID NO: 1337 - DNA, 120 bp, Artificial Sequence
  Description of Artificial Sequence: Synthetic polynucleotide
tcatcttcttccggatttggcggacctgttggtgctgagcataagaggtcttccgtatctgattgttgcgttttttagtaaaaccaacacagaacagacgaagcaagtaaccatcggtag

SEQ ID NO: 1338 - DNA, 120 bp, Artificial Sequence
  Description of Artificial Sequence: Synthetic polynucleotide
gagaggataaatagattggcaagccttttctatgtcttttccaatgctgtctggaatcaatttattgaccacttctttcaagtcatttgtctgcacctctcgggtcatgatttccatcat

SEQ ID NO: 1339 - DNA, 120 bp, Artificial Sequence
  Description of Artificial Sequence: Synthetic polynucleotide
gtctcgtccccagtggcttttccagaactactgccttcaccatgaagctccatgagctttcccaattcaaacttgggcttcttcagcatttttacttttctaacgaagacatcatggaga

SEQ ID NO: 1340 - DNA, 120 bp, Artificial Sequence
  Description of Artificial Sequence: Synthetic polynucleotide
tcagaagcaaaccatcacaaatagcactttttatttgccactatttgaagtctgaactttaaacagattcttggactggtggttcatatccatcagctcgttcaactttagcacctgtct

SEQ ID NO: 1341 - DNA, 120 bp, Artificial Sequence
  Description of Artificial Sequence: Synthetic polynucleotide
cagttcagctttgaagatgccatcagcgacaaacttcctcttcttggatatttgcactgccatcttgccgccgcgctccgctgaaaggaaaggaagtggctcgcgggcggaagtgagtat

SEQ ID NO: 1342 - DNA, 120 bp, Artificial Sequence
  Description of Artificial Sequence: Synthetic polynucleotide
ccaagaacattctgtgttctggtggctaagataatgatttctgtcctggttggtgtaactcgcacctcaactccagagtagccatcttcagccagctcccgagtaagaaactcattcagt

SEQ ID NO: 1343 - DNA, 120 bp, Artificial Sequence
  Description of Artificial Sequence: Synthetic polynucleotide
tggcacacagacctctagtggccaccttttcagcataaagctctacactgccctctggaaagccaaacctcttctgaactacagcagtcagttcccgaatccgccggcccttctcaccaa

SEQ ID NO: 1344 - DNA, 120 bp, Artificial Sequence
  Description of Artificial Sequence: Synthetic polynucleotide
cacaacctcgcagcctttggccccactctccatgatgaaccgcagcacaccatagcaggccctccgcacagcaagccctcctaggagtttgtaacgcagagactctgcctgggcaatggc

SEQ ID NO: 1345 - DNA, 120 bp, Artificial Sequence
  Description of Artificial Sequence: Synthetic polynucleotide
aacacgtggcgcacagcagtgtcaacgtagtagttaacagggtctccgctgtggatcatcaggccatccacaaacttcatggatttagccctctgtcctcggagtttcccagacaccaca

SEQ ID NO: 1346 - DNA, 120 bp, Artificial Sequence
  Description of Artificial Sequence: Synthetic polynucleotide
tctttgggttccacaatgctcacgtggtcaggcaggggcttcttagggccaatcttaccagttgggtcccagggcagcatgatcttcaccttgatgcccagcacaccctgtctgagcaac

SEQ ID NO: 1347 - DNA, 120 bp, Artificial Sequence
  Description of Artificial Sequence: Synthetic polynucleotide
ccagaatacagctgccaaggagaccctgttatgctgtggggactggctggggcatggcaggcggctctggcttcccacccttctgttctgagatgggggtggtgggcagtatctcatctt

SEQ ID NO: 1348 - DNA, 120 bp, Artificial Sequence
  Description of Artificial Sequence: Synthetic polynucleotide
tatgtaatgctccagaggccaacatgcccctcagtctgaatactgaacagtctagtcagaccttgtgtctttgtacaaaattttattaaaggtctttagagagcaacatccagactccag

SEQ ID NO: 1349 - DNA, 120 bp, Artificial Sequence
  Description of Artificial Sequence: Synthetic polynucleotide
ccttgcttgctatcagccttctctatcacacaaatattatttctctggttggctctgcttgggtcttactgttctggcccttgcaaataccacaagtatggttaaaaccaagaagatatg

SEQ ID NO: 1350 - DNA, 120 bp, Artificial Sequence
  Description of Artificial Sequence: Synthetic polynucleotide
catttatattcactttctatgtgcaacgtggatcgccttatgcataggaaaaactcaaacatatccctcttctaaacctacaatcctgaactacaggacaacgaatcaaggtgctgcctt

SEQ ID NO: 1351 - DNA, 120 bp, Artificial Sequence
  Description of Artificial Sequence: Synthetic polynucleotide
gagccttatgtgccttcagtggtgcaagcaaatttcctttacactttagagaggttgattaacgagtacatatgtaaagaacacttagagcacagcatgacacaaaatataatggccatt

SEQ ID NO: 1352 - DNA, 120 bp, Artificial Sequence
  Description of Artificial Sequence: Synthetic polynucleotide
tccagaacataatagcctgtagtaccaatgactggttccatgatcccctaagagaacacaacttaggaatgtggattctaatgatagctttatactgcttaggcaaatttacttctgagc

SEQ ID NO: 1353 - DNA, 120 bp, Artificial Sequence
  Description of Artificial Sequence: Synthetic polynucleotide
ctagttttgcctgaaaaaatagtgccgaatttcttgtgaagtacagacactggtagaaaatacttcaaaacattgatagataaaatcagagacaatttaaatgttcttcacagttctcca

SEQ ID NO: 1354 - DNA, 120 bp, Artificial Sequence
  Description of Artificial Sequence: Synthetic polynucleotide
ggctgcatcaccaggaagcagccacctgataacagctttccctggaagtcccctctgtgatcaaccagcatctgatttaacaacagtctcatgattttcaagccaacctgtccctcacta

SEQ ID NO: 1355 - DNA, 120 bp, Artificial Sequence
  Description of Artificial Sequence: Synthetic polynucleotide
ttaccatgtgccaagcaatataaacaccatgtgcagctcagtctaattgagaagaaaaccaaatcatcacagcacctgctaagccatctgtggagccagggttatctcatcagccaggct

SEQ ID NO: 1356 - DNA, 120 bp, Artificial Sequence
  Description of Artificial Sequence: Synthetic polynucleotide
cactatagaagtgtacacttaaatggttaagatgaccaatttatgagtcaaaaaggaagggggggtcagatacttgtcagtgtacgccctacataattacctcaaatattaagcccttac

SEQ ID NO: 1357 - DNA, 120 bp, Artificial Sequence
  Description of Artificial Sequence: Synthetic polynucleotide
taagaaaaataagtctacatgttcaatacacacacaaccatcctttttgattatttttgacccaaagttggttgaatccacagatgcaaatcccttggacagagggctaactctgtcact

SEQ ID NO: 1358 - DNA, 120 bp, Artificial Sequence
  Description of Artificial Sequence: Synthetic polynucleotide
ttttagactttcaatcttcactggattacttttaatacctaatgtacatgctacatagctgttacaactgcagtgtacaagaaaataagtgacaagaaaatatagtattttgaaaataag

SEQ ID NO: 1359 - DNA, 120 bp, Artificial Sequence
  Description of Artificial Sequence: Synthetic polynucleotide
atgcttcttgggaccacgagccatggctgcgttaggcaaggaaagaggacctccgtcttccggtgcgcgtagaaattggggctggagactgcgcgcgccggattttcagctgctccgccc

SEQ ID NO: 1360 - DNA, 120 bp, Artificial Sequence
  Description of Artificial Sequence: Synthetic polynucleotide
aggaaaatgatgagggggagacactctctcaacttgtggggaccggtggatggacgaggagcaaacacaccggtcaatttatccagcatccaatgctttggagctgccacccgcttcaga

SEQ ID NO: 1361 - DNA, 120 bp, Artificial Sequence
  Description of Artificial Sequence: Synthetic polynucleotide
tccatgaatccagcagggtaggttatatcagttcggaccttgccatcgattttaatgaaccgctgcatgcaaatcttctttacttcatctcctgtcagggcatacttaagtctgttcctc

SEQ ID NO: 1362 - DNA, 120 bp, Artificial Sequence
  Description of Artificial Sequence: Synthetic polynucleotide
ttctcactttgcacaacttgtacttggcctcctcaggtgtaatacgatgtacagcaaagcgacccttggtgtcatagatcagacggaaattctctcccgtcttgtcaatgctgatgacat

SEQ ID NO: 1363 - DNA, 120 bp, Artificial Sequence
  Description of Artificial Sequence: Synthetic polynucleotide
tgccagtctccaaatcaatctgaatggtatcattcaccttgatgaggggatcggggtagcggatggtgcgggcatcatgagtcaccagatgagggattccttttgtgcccacaaagatct

SEQ ID NO: 1364 - DNA, 120 bp, Artificial Sequence
  Description of Artificial Sequence: Synthetic polynucleotide
cacgtcaaaagatccagggtgcctctctctgttggtgatcacaccaattcttcctaggttagcacctccagtcaccatacacaggttaccagtgtcgaacttgatgaaatcagtaatctt

SEQ ID NO: 1365 - DNA, 120 bp, Artificial Sequence
  Description of Artificial Sequence: Synthetic polynucleotide
ggtgaggcggataccctttcctcggggaagagaaatccatggtttgttgcccttgccaataacaaaaatgttggaaagtcgagtggcaaagctgttgccattggcatctttcacgtgaac

SEQ ID NO: 1366 - DNA, 120 bp, Artificial Sequence
  Description of Artificial Sequence: Synthetic polynucleotide
tgctattaatcctgccacaatatttttaattacgtacaaagatctgacatgtcacccagggacccatttcacccactgctctgtttggccgccagtcttttgtctctctcttcagcaatg

SEQ ID NO: 1367 - DNA, 120 bp, Artificial Sequence
  Description of Artificial Sequence: Synthetic polynucleotide
acacccgttagtttgtcaagcatccaatgcttcggcgctgcaacacgctttaagtgcttcttggggccccgggccatggcgaaactctgcgacggaagagaatctgttcttttccggtgc

SEQ ID NO: 1368 - DNA, 120 bp, Artificial Sequence
  Description of Artificial Sequence: Synthetic polynucleotide
ttctttacctcatctccagtcaacgcatacttgagtctattcctgaggaagacgatcagaggaagacattccctcagcttgtggggacctgtcgatggacgaggtgcaaatacacccgtt

SEQ ID NO: 1369 - DNA, 120 bp, Artificial Sequence
  Description of Artificial Sequence: Synthetic polynucleotide
gcggaaatgttcacctgtcttctcgatgctgatgacatccatgaatccagcagggtatgtgacatccactcgaaccttgccatcaattttgatgaaacgttgcatacatatcttctttac

SEQ ID NO: 1370 - DNA, 120 bp, Artificial Sequence
  Description of Artificial Sequence: Synthetic polynucleotide
agggattcccttcactcccacagtaatcttcctcactttgcacaacttgtactttgcctcttccactgtgatgcggtgaacagcaaaacggcccttggtgtcatagaccaggcggaaatg

SEQ ID NO: 1371 - DNA, 120 bp, Artificial Sequence
  Description of Artificial Sequence: Synthetic polynucleotide
atttgataaagttgattatcttgccagtccctaaatcaatctgcacagtatcgttcaccttgatgacaggatctgggtagcggatggttcgagcatcatgagtcaccaggtgagggattc

SEQ ID NO: 1372 - DNA, 120 bp, Artificial Sequence
  Description of Artificial Sequence: Synthetic polynucleotide
ccttcacatgcaccacatcaaaagaaccaggatgtctttccctgttggtgatcacaccaacacgaccgaggttggctccaccaatcaccatacacaaattgcctgtatcaaatttgataa

SEQ ID NO: 1373 - DNA, 120 bp, Artificial Sequence
  Description of Artificial Sequence: Synthetic polynucleotide
gcaacagtaagtcgaatgccctttcccctgggcagggaaatccaaggtttattgccattgccaatgacaaaaatgttggaaagcctcgtggcaaagctgttgccattggcatccttcaca

SEQ ID NO: 1374 - DNA, 120 bp, Artificial Sequence
  Description of Artificial Sequence: Synthetic polynucleotide
tttttaagaaacgagaattcactgtttatttgtgcaaagaaaaaaagatatgctgctactgcaatttagccactgctctgtttggtggccagcctcttatctctctcttcagcaacagta

SEQ ID NO: 1375 - DNA, 120 bp, Artificial Sequence
  Description of Artificial Sequence: Synthetic polynucleotide
gtctggggtctctgccaccgctggtgctgctgtctcccactcggtcatcctgagaacacagcctgagcgtctctgtcactcggcgtagaccacgcgccgccctggtacagacaggaagag

SEQ ID NO: 1376 - DNA, 120 bp, Artificial Sequence
  Description of Artificial Sequence: Synthetic polynucleotide
tgaggcaggtacttggcatacttctccttcactgcaatgtaatcctgcagggaaatgtcattgatctgcacatcatcggtgctccacttcccaaagagcttgatgtctggggtctctgcc

SEQ ID NO: 1377 - DNA, 120 bp, Artificial Sequence
  Description of Artificial Sequence: Synthetic polynucleotide
tcttgccgttgttgcggccgtgcatcatcatggagttagtgaggcgctccacaatgggacactgagctttgcggaagcgtttggcggcataccgccctgcactgtgaggcaggtacttgg

SEQ ID NO: 1378 - DNA, 120 bp, Artificial Sequence
  Description of Artificial Sequence: Synthetic polynucleotide
accactgttgatgatggcgttcaccaggacctgcagagggttctcgcctgtgagcaggtgtatgatctcgaaggcatgcttgacgatgcgcacagtcatgagcttcttgccgttgttgcg

SEQ ID NO: 1379 - DNA, 120 bp, Artificial Sequence
  Description of Artificial Sequence: Synthetic polynucleotide
cacagcagccagatggcctggttcacacggcgcaggggggacacatccacagcctgtcgtctcacagtcccggcgcgcccaatgcgtgtggagtcctcccggggaccactgttgatgatg

SEQ ID NO: 1380 - DNA, 120 bp, Artificial Sequence
  Description of Artificial Sequence: Synthetic polynucleotide
tggcataggagttcgaggagcccttggcagcattgatgagctcatctgccaggcactcagcaatggtcttaatgttccggaaggcagcctcacgagcgcctgtgcacagcagccagatgg

SEQ ID NO: 1381 - DNA, 120 bp, Artificial Sequence
  Description of Artificial Sequence: Synthetic polynucleotide
ttttggctgggactgccccaaagggcagacaggtttattgggcagcagctgggaaaatcagcggttggacttggccacacgctccagctcgtccttcttcttaatggcataggagttcga

SEQ ID NO: 1382 - DNA, 120 bp, Artificial Sequence
  Description of Artificial Sequence: Synthetic polynucleotide
agtacgaagtttgcgttcatcgtccacttcaatgagtttctggcagccagtggctgggaaggagatgttcagcttcatcttgaagcagctgaacgcctccgaggcgccacggaaaagagg

SEQ ID NO: 1383 - DNA, 120 bp, Artificial Sequence
  Description of Artificial Sequence: Synthetic polynucleotide
cctgcttcatggggaaaccttgtttgtcgttcccaccactgattcggaccacataacccttccattcttcacccagagcgtcagcagcaacttctgtggccatacgcttctcatagaaag

SEQ ID NO: 1384 - DNA, 120 bp, Artificial Sequence
  Description of Artificial Sequence: Synthetic polynucleotide
tttgcatccacaatgcaaccacgaactgattttctctttctttctccagttctccttggtctgtaacaggaatgccccttactcagtagcaggcggacacggccatgggtcaagacaccc

SEQ ID NO: 1385 - DNA, 120 bp, Artificial Sequence
  Description of Artificial Sequence: Synthetic polynucleotide
aaagtttgcggattctgctagctcttttggggcccaggcggcgaggcactgtagtatcagtcagtccaggaatatccttctctcctttttttacaataaccaagttgagaacgctcagat

SEQ ID NO: 1386 - DNA, 120 bp, Artificial Sequence
  Description of Artificial Sequence: Synthetic polynucleotide
acacgtggagtaacaagacgctgaatcttgggtgctttggtcctaggtttcttaccttctttatttaagggctttcttacaacatactggcggacatcatcttctttagagagattgaaa

SEQ ID NO: 1387 - DNA, 120 bp, Artificial Sequence
  Description of Artificial Sequence: Synthetic polynucleotide
cttctccttagcctccttcattctcttggccaaaagtttagcatattctgcagcctcttctttatttttcttggtacgctgcttcttcagagcaatacgccgccgtttgtgctgcaggac

SEQ ID NO: 1388 - DNA, 120 bp, Artificial Sequence
  Description of Artificial Sequence: Synthetic polynucleotide
cagagtctgatcttatttatttgttactcaaaaaatcttatttctgactggattcagacttagaagtagaagctcgcagagaggaaagtctgcgtctcttcgcaatttgttcctggcgct

SEQ ID NO: 1389 - DNA, 120 bp, Artificial Sequence
  Description of Artificial Sequence: Synthetic polynucleotide
ctcgaactgaacatggctttctcctgggagaacttgccgagcgccggcttaggaagagacccaaatctcgcgagagcacgtcaaaatccggcgtccgaaggcaagaggcggaaacagcgc

SEQ ID NO: 1390 - DNA, 120 bp, Artificial Sequence
  Description of Artificial Sequence: Synthetic polynucleotide
tgagccttgaggtccgagttcatctccagctccagaagagcctgggagatgccggactcgaactcgtccggcttctcgccattgggcttcacgatcttggcgctcgaactgaacatggct

SEQ ID NO: 1391 - DNA, 120 bp, Artificial Sequence
  Description of Artificial Sequence: Synthetic polynucleotide
ggaaagatttcagttgaggaacgggaacaaagattatgatagctttccgaccaccaccaacttcaatttccttagctgccgtaatattcagctccctgagctgagccttgaggtccgagt

SEQ ID NO: 1392 - DNA, 120 bp, Artificial Sequence
  Description of Artificial Sequence: Synthetic polynucleotide
ttcgagttggcttaggcagaattctcctctgagcgataaagacgacatgcttcccactgaactttttctccaattcgcgtactagccggacttggattttctggaaagatttcagttgag

SEQ ID NO: 1393 - DNA, 120 bp, Artificial Sequence
  Description of Artificial Sequence: Synthetic polynucleotide
ccacaatttcgcttgggaagaccaagtcctcaaggatggcatcgtgcacagctgtcagagtacggctcctgggacgcttttgcttattttttgtacggctttttcgagttggcttaggca

SEQ ID NO: 1394 - DNA, 120 bp, Artificial Sequence
  Description of Artificial Sequence: Synthetic polynucleotide
agaaaaagtttcaaccttgtgttccacattgttctgctgtgctttgtccaaatgaacctttatgagccggctgccatctagtttgacgcggattctcttgcccacaatttcgcttgggaa

SEQ ID NO: 1395 - DNA, 120 bp, Artificial Sequence
  Description of Artificial Sequence: Synthetic polynucleotide
tttactgtgaatatatactttttatttagtcatttttgtttacaattgaaactctgggaattcaaaattaacatccttgcccgtgagcttcttatagacaccagaaaaagtttcaacctt

SEQ ID NO: 1396 - DNA, 120 bp, Artificial Sequence
  Description of Artificial Sequence: Synthetic polynucleotide
ctgggcgccccaactcatacttccgcttcttgtggtagggctttctcttgcccccggttttgcggcgcttgtgccagttgtcccgagagatgcccatcgctcggcgctggctggaaagag

SEQ ID NO: 1397 - DNA, 120 bp, Artificial Sequence
  Description of Artificial Sequence: Synthetic polynucleotide
aacactctgagccccaggagaaattccccacgtccaacctcagggcacggtatttcttgttacctccccgcacacggactgtgtggatgcggcgggggccaatcttggtgttggcagctg

SEQ ID NO: 1398 - DNA, 120 bp, Artificial Sequence
  Description of Artificial Sequence: Synthetic polynucleotide
gtcggtacggtgtgctgtcgatgagcacgatgcaattcttcaccagggtcttggtacgaaccagctcgttattagatgcattgtagacaacatcgatgatccttgttttacgagtacaac

SEQ ID NO: 1399 - DNA, 120 bp, Artificial Sequence
  Description of Artificial Sequence: Synthetic polynucleotide
catatttcttctgaatttttttagatcgttttttgtttaaaatctcttcttcctcaggagtcagcttggctcccttcttgcggcccaggggcagcgcatagtgggactcgtaccactgtc

SEQ ID NO: 1400 - DNA, 120 bp, Artificial Sequence
  Description of Artificial Sequence: Synthetic polynucleotide
catagccatctgctcggccacactgtcccggccttgaagcgatgcacgcaagaagcttgccctgctggaactgctcctccaggagactgctgattttggcattctttttcctttcatcat

SEQ ID NO: 1401 - DNA, 120 bp, Artificial Sequence
  Description of Artificial Sequence: Synthetic polynucleotide
tgtgggaacaaaacaataaacacctttattacatgggtgaagacaaaacaaggatttatttgcctttgcgggccttgattttcctaagatagaactccaactctttgccctctagcacat

SEQ ID NO: 1402 - DNA, 120 bp, Artificial Sequence
  Description of Artificial Sequence: Synthetic polynucleotide
tctcgaagggtctccgcggggtcacataagttttgcgacaaacccagctccgggccactggcatgttggctccgcttccccgtctgcgcctaagcaaaccacccggtcactgagaaagag

SEQ ID NO: 1403 - DNA, 120 bp, Artificial Sequence
  Description of Artificial Sequence: Synthetic polynucleotide
cagcagttcccgggcggccttgcggatcttggccagggtaaatttgaccctccagacctcacgtttgttccggagcccatactcgccgatcagcttcagctcttggtcgagacgagattt

SEQ ID NO: 1404 - DNA, 120 bp, Artificial Sequence
  Description of Artificial Sequence: Synthetic polynucleotide
tcaggcccaggatgtaatccagcttcatcttgccctcatccagcaccccaatgcggaccagccgccgcagcagggcgttgccttcgaacagacgccgtgggtccttctcatcaagcgtca

SEQ ID NO: 1405 - DNA, 120 bp, Artificial Sequence
  Description of Artificial Sequence: Synthetic polynucleotide
ctgcttgcggaccctgatatggcgctggcggatcagcacgcgagcgtggtggatggacttggccaagcccagcttgaagacctgggtctgcaggcgtctctctaagaaatcctctatctt

SEQ ID NO: 1406 - DNA, 120 bp, Artificial Sequence
  Description of Artificial Sequence: Synthetic polynucleotide
tcttggcattcttcctcttcacgcggcccgggcggccacccccgtagggagagcgcagagagaagtcgatgtgcttctgggaatccaggcggacaatgaaggacgggatgttcaccacct

SEQ ID NO: 1407 - DNA, 120 bp, Artificial Sequence
  Description of Artificial Sequence: Synthetic polynucleotide
ttgtaaagcgctgatcctgtttatttggcaggaaaacgagacaatccagcagcccaggagggacaggtggacttaatcctcctcctcgtcgtctccagccccagccccaccctggccctt

SEQ ID NO: 1408 - DNA, 120 bp, Artificial Sequence
  Description of Artificial Sequence: Synthetic polynucleotide
tccttcatttgcaggacatcaagggctccggacattgtgaaaatttccctttaagttacgacgggaatccagaacaacgccgtatggacccctctgcaggtagcacggaaaagacaggcg

SEQ ID NO: 1409 - DNA, 120 bp, Artificial Sequence
  Description of Artificial Sequence: Synthetic polynucleotide
tttatgatatagatgccatcacttttccttttatagatgtactgttccatctggaagtcaagattggtgccacctaagtgggttcctgctgcaaggaacttaaggacatcctcctccttc

SEQ ID NO: 1410 - DNA, 120 bp, Artificial Sequence
  Description of Artificial Sequence: Synthetic polynucleotide
cagcacagccctctggccagtattcctggaggatataacactgacatcagcagggttttcaatggcaacaattgcacgagctgccagcagaagcttctcccaggtcctcttgagatttat

SEQ ID NO: 1411 - DNA, 120 bp, Artificial Sequence
  Description of Artificial Sequence: Synthetic polynucleotide
gtcagtaaccacaagaagccgtggctcccggaaggctgcctggatctggttagtgaaggttccaggagtgaagcggccagcaattggagtggctccagtggcagcagcaaacttcagcac

SEQ ID NO: 1412 - DNA, 120 bp, Artificial Sequence
  Description of Artificial Sequence: Synthetic polynucleotide
tgttgcatgggatggcaatgtccacatagcgcagaggagaatctgtgttacacagcgcaatggtaggtaggttaacataagatgcctccgtgagaggctggtggtcagccctggggtcag

SEQ ID NO: 1413 - DNA, 120 bp, Artificial Sequence
  Description of Artificial Sequence: Synthetic polynucleotide
agtacagatcaggcatgacctcccatgggtgttcacgggaaatggtgccacgcatgcgcagaacttcccgagccagcatccaccacatcaaacccactgagtgagctcccttgttgttgc

SEQ ID NO: 1414 - DNA, 120 bp, Artificial Sequence
  Description of Artificial Sequence: Synthetic polynucleotide
gtagcagtgaactcaggagcgggagcagtccattcaccctgaaattcctccttggtcactgccttctcagcagcagcctgctcttctttttcaatctcttcaggatctctgtagaagtac

SEQ ID NO: 1415 - DNA, 120 bp, Artificial Sequence
  Description of Artificial Sequence: Synthetic polynucleotide
gctgcagaccagtcttccgtggcaggctgagcgctccagtcttcagtagggaattgctgaataggcacagagggcacctgtacaccttcagaccagtctgcaacctcaggctgagtagca

SEQ ID NO: 1416 - DNA, 120 bp, Artificial Sequence
  Description of Artificial Sequence: Synthetic polynucleotide
aactgatgtttattttccatcaaccatttttccatgctgcttaagagcctatgcaagaacagcttaagaccagtcagtggttgctcctacccattcagtggcctgagcagtgggagctgc

SEQ ID NO: 1417 - DNA, 120 bp, Artificial Sequence
  Description of Artificial Sequence: Synthetic polynucleotide
ttttttagaagtacaactcatgtcgagacatgtatttattattatgctttgatatgcaatcccaggtattctgatctggagtaaaaagcaaactaaatgaagacaacttttagaaactga

SEQ ID NO: 1418 - DNA, 576 bp, Homo sapiens
actcttctggtccccacagactcagagagaacccaccatggtgctgtctcctgccgacaagaccaacgtcaaggccgcctggggtaaggtcggcgcgcacgctggcgagtatggtgcggaggccctggagaggatgttcctgtccttccccaccaccaagacctacttcccgcacttcgacctgagccacggctctgcccaggttaagggccacggcaagaaggtggccgacgcgctgaccaacgccgtggcgcacgtggacgacatgcccaacgcgctgtccgccctgagcgacctgcacgcgcacaagcttcgggtggacccggtcaacttcaagctcctaagccactgcctgctggtgaccctggccgcccacctccccgccgagttcacccctgcggtgcacgcctccctggacaagttcctggcttctgtgagcaccgtgctgacctccaaataccgttaagctggagcctcggtggccatgcttcttgccccttgggcctccccccagcccctcctccccttcctgcacccgtacccccgtggtctttgaataaagtctgagtgggcggc

SEQ ID NO: 1419 - DNA, 604 bp, Homo sapiens
cataaaccctggcgcgctcgcgggccggcactcttctggtccccacagactcagagagaacccaccatggtgctgtctcctgccgacaagaccaacgtcaaggccgcctggggtaaggtcggcgcgcacgctggcgagtatggtgcggaggccctggagaggatgttcctgtccttccccaccaccaagacctacttcccgcacttcgacctgagccacggctctgcccaggttaagggccacggcaagaaggtggccgacgcgctgaccaacgccgtggcgcacgtggacgacatgcccaacgcgctgtccgccctgagcgacctgcacgcgcacaagcttcgggtggacccggtcaacttcaagctcctaagccactgcctgctggtgaccctggccgcccacctccccgccgagttcacccctgcggtgcacgcctccctggacaagttcctggcttctgtgagcaccgtgctgacctccaaataccgttaagctggagcctcggtagccgttcctcctgcccgctgggcctcccaacgggccctcctcccctccttgcaccggcccttcctggtctttgaataaagtctgagtgggcagc

SEQ ID NO: 1420 - DNA, 626 bp, Homo sapiens
acatttgcttctgacacaactgtgttcactagcaacctcaaacagacaccatggtgcatctgactcctgaggagaagtctgccgttactgccctgtggggcaaggtgaacgtggatgaagttggtggtgaggccctgggcaggctgctggtggtctacccttggacccagaggttctttgagtcctttggggatctgtccactcctgatgctgttatgggcaaccctaaggtgaaggctcatggcaagaaagtgctcggtgcctttagtgatggcctggctcacctggacaacctcaagggcacctttgccacactgagtgagctgcactgtgacaagctgcacgtggatcctgagaacttcaggctcctgggcaacgtgctggtctgtgtgctggcccatcactttggcaaagaattcaccccaccagtgcaggctgcctatcagaaagtggtggctggtgtggctaatgccctggcccacaagtatcactaagctcgctttcttgctgtccaatttctattaaaggttcctttgttccctaagtccaactactaaactgggggatattatgaagggccttgagcatctggattctgcctaataaaaaacatttattttcattgc

SEQ ID NO: 1421 - DNA, 774 bp, Homo sapiens
agggcaagttaagggaatagtggaatgaaggttcatttttcattctcacaaactaatgaaaccctgcttatcttaaaccaacctgctcactggagcagggaggacaggaccagcataaaaggcagggcagagtcgactgttgcttacactttcttctgacataacagtgttcactagcaacctcaaacagacaccatggtgcatctgactcctgaggagaagactgctgtcaatgccctgtggggcaaagtgaacgtggatgcagttggtggtgaggccctgggcagattactggtggtctacccttggacccagaggttctttgagtcctttggggatctgtcctctcctgatgctgttatgggcaaccctaaggtgaaggctcatggcaagaaggtgctaggtgcctttagtgatggcctggctcacctggacaacctcaagggcactttttctcagctgagtgagctgcactgtgacaagctgcacgtggatcctgagaacttcaggctcttgggcaatgtgctggtgtgtgtgctggcccgcaactttggcaaggaattcaccccacaaatgcaggctgcctatcagaaggtggtggctggtgtggctaatgccctggctcacaagtaccattgagatcctggactgtttcctgataaccataagaagaccctatttccctagattctattttctgaacttgggaacacaatgcctacttcaagggtatggcttctgcctaataaagaatgttcagctcaacttcctgat

SEQ ID NO: 1422 - DNA, 584 bp, Homo sapiens
acactcgcttctggaacgtctgaggttatcaataagctcctagtccagacgccatgggtcatttcacagaggaggacaaggctactatcacaagcctgtggggcaaggtgaatgtggaagatgctggaggagaaaccctgggaaggctcctggttgtctacccatggacccagaggttctttgacagctttggcaacctgtcctctgcctctgccatcatgggcaaccccaaagtcaaggcacatggcaagaaggtgctgacttccttgggagatgccacaaagcacctggatgatctcaagggcacctttgcccagctgagtgaactgcactgtgacaagctgcatgtggatcctgagaacttcaagctcctgggaaatgtgctggtgaccgttttggcaatccatttcggcaaagaattcacccctgaggtgcaggcttcctggcagaagatggtgactgcagtggccagtgccctgtcctccagataccactgagctcactgcccatgattcagagctttcaaggataggctttattctgcaagcaatacaaataataaatctattctgctgagagatcac

SEQ ID NO: 1423 - DNA, 583 bp, Homo sapiens
acactcgcttctggaacgtctgaggttatcaataagctcctagtccagacgccatgggtcatttcacagaggaggacaaggctactatcacaagcctgtggggcaaggtgaatgtggaagatgctggaggagaaaccctgggaaggctcctggttgtctacccatggacccagaggttctttgacagctttggcaacctgtcctctgcctctgccatcatgggcaaccccaaagtcaaggcacatggcaagaaggtgctgacttccttgggagatgccataaagcacctggatgatctcaagggcacctttgcccagctgagtgaactgcactgtgacaagctgcatgtggatcctgagaacttcaagctcctgggaaatgtgctggtgaccgttttggcaatccatttcggcaaagaattcacccctgaggtgcaggcttcctggcagaagatggtgactggagtggccagtgccctgtcctccagataccactgagctcactgcccatgatgcagagctttcaaggataggctttattctgcaagcaatcaaataataaatctattctgctaagagatcac

SEQ ID NO: 1424 - DNA, 120 bp, Artificial Sequence
  Description of Artificial Sequence: Synthetic polynucleotide
tccgcaccatactcgccagcgtgcgcgccgaccttaccccaggcggccttgacgttggtcttgtcggcaggagacagcaccatggtgggttctctctgagtctgtggggaccagaagagt

SEQ ID NO: 1425 - DNA, 120 bp, Artificial Sequence
  Description of Artificial Sequence: Synthetic polynucleotide
gcgtcggccaccttcttgccgtggcccttaacctgggcagagccgtggctcaggtcgaagtgcgggaagtaggtcttggtggtggggaaggacaggaacatcctctccagggcctccgca

SEQ ID NO: 1426 - DNA, 120 bp, Artificial Sequence
  Description of Artificial Sequence: Synthetic polynucleotide
tggcttaggagcttgaagttgaccgggtccacccgaagcttgtgcgcgtgcaggtcgctcagggcggacagcgcgttgggcatgtcgtccacgtgcgccacggcgttggtcagcgcgtcg

SEQ ID NO: 1427 - DNA, 120 bp, Artificial Sequence
  Description of Artificial Sequence: Synthetic polynucleotide
cggtatttggaggtcagcacggtgctcacagaagccaggaacttgtccagggaggcgtgcaccgcaggggtgaactcggcggggaggtgggcggccagggtcaccagcaggcagtggctt

SEQ ID NO: 1428 - DNA, 120 bp, Artificial Sequence
  Description of Artificial Sequence: Synthetic polynucleotide
gccgcccactcagactttattcaaagaccacgggggtacgggtgcaggaaggggaggaggggctggggggaggcccaaggggcaagaagcatggccaccgaggctccagcttaacggtat

SEQ ID NO: 1429 - DNA, 120 bp, Artificial Sequence
  Description of Artificial Sequence: Synthetic polynucleotide
gaccttaccccaggcggccttgacgttggtcttgtcggcaggagacagcaccatggtgggttctctctgagtctgtggggaccagaagagtgccggcccgcgagcgcgccagggtttatg

SEQ ID NO: 1430 - DNA, 120 bp, Artificial Sequence
  Description of Artificial Sequence: Synthetic polynucleotide
ggctcaggtcgaagtgcgggaagtaggtcttggtggtggggaaggacaggaacatcctctccagggcctccgcaccatactcgccagcgtgcgcgccgaccttaccccaggcggccttga

SEQ ID NO: 1431 - DNA, 120 bp, Artificial Sequence
  Description of Artificial Sequence: Synthetic polynucleotide
gcggacagcgcgttgggcatgtcgtccacgtgcgccacggcgttggtcagcgcgtcggccaccttcttgccgtggcccttaacctgggcagagccgtggctcaggtcgaagtgcgggaag

SEQ ID NO: 1432 - DNA, 120 bp, Artificial Sequence
  Description of Artificial Sequence: Synthetic polynucleotide
gggaggtgggcggccagggtcaccagcaggcagtggcttaggagcttgaagttgaccgggtccacccgaagcttgtgcgcgtgcaggtcgctcagggcggacagcgcgttgggcatgtcg

SEQ ID NO: 1433 - DNA, 120 bp, Artificial Sequence
  Description of Artificial Sequence: Synthetic polynucleotide
cgaggctccagcttaacggtatttggaggtcagcacggtgctcacagaagccaggaacttgtccagggaggcgtgcaccgcaggggtgaactcggcggggaggtgggcggccagggtcac

SEQ ID NO: 1434 - DNA, 120 bp, Artificial Sequence
  Description of Artificial Sequence: Synthetic polynucleotide
gctgcccactcagactttattcaaagaccaggaagggccggtgcaaggaggggaggagggcccgttgggaggcccagcgggcaggaggaacggctaccgaggctccagcttaacggtatt

SEQ ID NO: 1435 - DNA, 120 bp, Artificial Sequence
  Description of Artificial Sequence: Synthetic polynucleotide
cttcatccacgttcaccttgccccacagggcagtaacggcagacttctcctcaggagtcagatgcaccatggtgtctgtttgaggttgctagtgaacacagttgtgtcagaagcaaatgt

SEQ ID NO: 1436 - DNA, 120 bp, Artificial Sequence
  Description of Artificial Sequence: Synthetic polynucleotide
gcccataacagcatcaggagtggacagatccccaaaggactcaaagaacctctgggtccaagggtagaccaccagcagcctgcccagggcctcaccaccaacttcatccacgttcacctt

SEQ ID NO: 1437 - DNA, 120 bp, Artificial Sequence
  Description of Artificial Sequence: Synthetic polynucleotide
tcactcagtgtggcaaaggtgcccttgaggttgtccaggtgagccaggccatcactaaaggcaccgagcactttcttgccatgagccttcaccttagggttgcccataacagcatcagga

SEQ ID NO: 1438 - DNA, 120 bp, Artificial Sequence
  Description of Artificial Sequence: Synthetic polynucleotide
ggggtgaattctttgccaaagtgatgggccagcacacagaccagcacgttgcccaggagcctgaagttctcaggatccacgtgcagcttgtcacagtgcagctcactcagtgtggcaaag

SEQ ID NO: 1439 - DNA, 120 bp, Artificial Sequence
  Description of Artificial Sequence: Synthetic polynucleotide
ttaatagaaattggacagcaagaaagcgagcttagtgatacttgtgggccagggcattagccacaccagccaccactttctgataggcagcctgcactggtggggtgaattctttgccaa

SEQ ID NO: 1440 - DNA, 120 bp, Artificial Sequence
  Description of Artificial Sequence: Synthetic polynucleotide
gcaatgaaaataaatgttttttattaggcagaatccagatgctcaaggcccttcataatatcccccagtttagtagttggacttagggaacaaaggaacctttaatagaaattggacagc

SEQ ID NO: 1441 - DNA, 120 bp, Artificial Sequence
  Description of Artificial Sequence: Synthetic polynucleotide
ttttatgctggtcctgtcctccctgctccagtgagcaggttggtttaagataagcagggtttcattagtttgtgagaatgaaaaatgaaccttcattccactattcccttaacttgccct

SEQ ID NO: 1442 - DNA, 120 bp, Artificial Sequence
  Description of Artificial Sequence: Synthetic polynucleotide
cagcagtcttctcctcaggagtcagatgcaccatggtgtctgtttgaggttgctagtgaacactgttatgtcagaagaaagtgtaagcaacagtcgactctgccctgccttttatgctgg

SEQ ID NO: 1443 - DNA, 120 bp, Artificial Sequence
  Description of Artificial Sequence: Synthetic polynucleotide
tccccaaaggactcaaagaacctctgggtccaagggtagaccaccagtaatctgcccagggcctcaccaccaactgcatccacgttcactttgccccacagggcattgacagcagtcttc

SEQ ID NO: 1444 - DNA, 120 bp, Artificial Sequence
  Description of Artificial Sequence: Synthetic polynucleotide
gcccttgaggttgtccaggtgagccaggccatcactaaaggcacctagcaccttcttgccatgagccttcaccttagggttgcccataacagcatcaggagaggacagatccccaaagga

SEQ ID NO: 1445 - DNA, 120 bp, Artificial Sequence
  Description of Artificial Sequence: Synthetic polynucleotide
tgccaaagttgcgggccagcacacacaccagcacattgcccaagagcctgaagttctcaggatccacgtgcagcttgtcacagtgcagctcactcagctgagaaaaagtgcccttgaggt

SEQ ID NO: 1446 - DNA, 120 bp, Artificial Sequence
  Description of Artificial Sequence: Synthetic polynucleotide
tggttatcaggaaacagtccaggatctcaatggtacttgtgagccagggcattagccacaccagccaccaccttctgataggcagcctgcatttgtggggtgaattccttgccaaagttg

SEQ ID NO: 1447 - DNA, 120 bp, Artificial Sequence
  Description of Artificial Sequence: Synthetic polynucleotide
atcaggaagttgagctgaacattctttattaggcagaagccatacccttgaagtaggcattgtgttcccaagttcagaaaatagaatctagggaaatagggtcttcttatggttatcagg

SEQ ID NO: 1448 - DNA, 120 bp, Artificial Sequence
  Description of Artificial Sequence: Synthetic polynucleotide
cttccacattcaccttgccccacaggcttgtgatagtagccttgtcctcctctgtgaaatgacccatggcgtctggactaggagcttattgataacctcagacgttccagaagcgagtgt

SEQ ID NO: 1449 - DNA, 120 bp, Artificial Sequence
  Description of Artificial Sequence: Synthetic polynucleotide
gactttggggttgcccatgatggcagaggcagaggacaggttgccaaagctgtcaaagaacctctgggtccatgggtagacaaccaggagccttcccagggtttctcctccagcatcttc

SEQ ID NO: 1450 - DNA, 120 bp, Artificial Sequence
  Description of Artificial Sequence: Synthetic polynucleotide
ccacatgcagcttgtcacagtgcagttcactcagctgggcaaaggtgcccttgagatcatccaggtgctttatggcatctcccaaggaagtcagcaccttcttgccatgtgccttgactt

SEQ ID NO: 1451 - DNA, 120 bp, Artificial Sequence
  Description of Artificial Sequence: Synthetic polynucleotide
cactccagtcaccatcttctgccaggaagcctgcacctcaggggtgaattctttgccgaaatggattgccaaaacggtcaccagcacatttcccaggagcttgaagttctcaggatccac

SEQ ID NO: 1452 - DNA, 120 bp, Artificial Sequence
  Description of Artificial Sequence: Synthetic polynucleotide
gtgatctcttagcagaatagatttattatttgattgcttgcagaataaagcctatccttgaaagctctgcatcatgggcagtgagctcagtggtatctggaggacagggcactggccact

SEQ ID NO: 1453 - protein, 6 aa, Artificial Sequence
  Description of Artificial Sequence: Synthetic 6xHis tag
HHHHHH

SEQ ID NO: 1454 - DNA, 120 bp, Artificial Sequence; identical to SEQ ID NO: 126
  Description of Artificial Sequence: Synthetic polynucleotide

SEQ ID NO: 1455 - DNA, 120 bp, Artificial Sequence; identical to SEQ ID NO: 17
  Description of Artificial Sequence: Synthetic polynucleotide

SEQ ID NO: 1456 - DNA, 120 bp, Artificial Sequence; identical to SEQ ID NO: 21
  Description of Artificial Sequence: Synthetic polynucleotide

What is claimed is:

1. A method of selectively removing a undesired RNA target from a population of RNA molecules, comprising:
(a) contacting the population of RNA molecules with a DNA oligonucleotide comprising a bait to form a mixture; and
(b) isolating the undesired RNA target from the mixture.

2. The method of claim 1, wherein the step of contacting the population of RNA molecules with a DNA oligonucleotide comprising a bait comprises incubating the mixture in an appropriate buffer at a temperature sufficient to form a bait:undesired RNA target complex.

3. The method of claim 1, wherein the step of isolating the undesired RNA target comprises:
(i) forming a bait:undesired RNA target complex; and
(ii) separating the bait:undesired RNA target complex from the mixture.

4. The method of claim 1, wherein the bait comprises a sequence having substantial sequence complementarity to a sequence within the undesired RNA target.

5. The method of claim 1, wherein the bait includes a covalent modification to enable selection of the bait:undesired RNA target complex.

6. The method of claim 5, wherein the covalent modification is a biotinylated group.

7. The method of claim 6, wherein the bait:undesired RNA target complex is contacted with a solid support coupled to avidin or streptavidin.

8. The method of claim 7, wherein the solid support comprises magnetic particles.

9. The method of claim 3, wherein the bait:undesired RNA target complex is separated from the mixture by immobilization on magnetic particles and the magnetic particles are subsequently removed from the desired RNA.

10. The method of claim 9, wherein the magnetic particles are removed from the desired RNA by attraction to a magnet.

11. The method of claim 10 wherein the magnet used to attract the magnetic particles is inserted into the vessel containing the desired RNA.

12. The method of claim 1, wherein the undesired RNA target comprises a highly abundant RNA in the population of RNA molecules.

13. The method of claim 12, wherein the highly abundant RNA is selected from an rRNA, a mRNA encoding a ribosomal protein and a mRNA encoding a globin protein.

14. The method of claim 12, wherein the highly abundant RNA comprises rRNA.

15. A method of performing massively parallel sequencing of RNA from a sample, comprising:
(a) contacting a complex population of total RNA with a plurality of DNA oligonucleotides comprising baits to form a mixture, wherein at least one member of the plurality of DNA oligonucleotides comprising baits has substantial sequence complementarity to a sequence within at least one species of an undesired RNA target;
(b) isolating the at least one species of an undesired RNA target from the mixture to form a depleted population of total RNA;
(c) preparing a cDNA library of the depleted population of total RNA; and
(d) sequencing the cDNA library of the depleted library population of total RNA.

16. The method of claim 15, wherein the step of isolating the at least one species of an undesired RNA target from the mixture to form the depleted population of total RNA comprises:
(i) forming a plurality of hybrid complexes between the at least one species of an undesired RNA target and a plurality of oligonucleotides as baits; and
(ii) separating the plurality of hybrid complexes from the mixture.

17. The method of claim 16, wherein each member of the plurality of oligonucleotides as baits comprises a covalent modification.

18. The method of claim 17, wherein the covalent modification comprises a biotinylated group.

19. The method of claim 16, wherein the step of separating the plurality of hybrid complexes from the mixture comprises contacting the mixture comprising the plurality of hybrid complexes with a solid support coupled to avidin or streptavidin.

20. The method of claim 16 wherein at least one member of the plurality of oligonucleotides as baits comprises a biotinylated group at the 3′ end and at the 5′ end of the oligonucleotide.

21. The method of claim 20 wherein the plurality of oligonucleotides are between 45 and 80 bases long.

22. The method of claim 15, wherein the undesired RNA target comprises a highly abundant RNA in the complex population of total RNA.

23. The method of claim 22, wherein the highly abundant RNA is selected from an rRNA, a mRNA encoding a ribosomal protein and a mRNA encoding a globin protein.

24. The method of claim 15, wherein the step of preparing the cDNA library of the depleted population of total RNA comprises:
fragmenting the depleted population of total RNA to form a depleted population of fragmented RNA; and
converting the depleted population of fragmented desired RNA to form double-stranded cDNA,

25. A kit comprising a capture reagent for use in a selection method of an undesired RNA, wherein the capture reagent comprises a plurality of DNA bait oligonucleotides, wherein each member of the plurality of DNA bait oligonucleotides is prepared individually by a synthetic chemical process.

26. The kit of claim 25, wherein the undesired RNA comprises a highly abundant RNA in a total RNA sample.

27. The kit of claim 26, wherein the highly abundant RNA is selected from rRNA, a mRNA encoding a ribosomal protein and a mRNA encoding a globin protein.

28. The kit of claim 26, wherein the highly abundant RNA comprises rRNA.

29. The kit of claim 25, wherein the plurality of DNA bait oligonucleotides comprises at least two members selected from a group consisting of SEQ ID NOS: 17-645, 725-1417, 1424-1452, and 1454-1456.
